(19) United States
(12) Patent Application Publication
(10) Pub. No.: US 2007/0099833 A1
(43) Pub. Date: May 3, 2007

(54) Albumin fusion proteins

(75) Inventors: Craig A. Rosen, Laytonsville, MD (US); William A. Haseltine, Washington, DC (US)

Correspondence Address: FINNEGAN, HENDERSON, FARABOW, GARRETT & DUNNER;LLP, 901 NEW YORK AVENUE, NW, WASHINGTON, DC, 20001-4413, US

(73) Assignee: Human Genome Sciences, Inc.

(21) Appl. No.: 11/545,766

(22) Filed: Oct. 11, 2006

Related U.S. Application Data
(63) Continuation of application No. 11/264,096, filed on Nov. 2, 2005.
Application No. 11/264,096 is a division of application No. 09/833,245, filed on Apr. 12, 2001, now abandoned.

(51) Int. Cl. A61K 38/38; C07K 14/765

(52) U.S. Cl. 514/12; 530/363

(57) ABSTRACT

The present invention encompasses albumin fusion proteins. Nucleic acid molecules encoding the albumin fusion proteins of the invention are also encompassed by the invention, as are vectors containing these nucleic acids, host cells transformed with these nucleic acids vectors, and methods of making the albumin fusion proteins of the invention and using these nucleic acids, vectors, and/or host cells. Additionally the present invention encompasses pharmaceutical compositions comprising albumin fusion proteins and methods of treating, preventing, or ameliorating diseases, disordrs or conditions using albumin fusion proteins of the invention.

### CROSS-REFERENCE TO RELATED APPLICATIONS

[0001] This application is a continuation of U.S. patent application Ser. No. 11/264,096, filed Nov. 2, 2005, which is a divisional of U.S. patent application Ser. No. 09/833,245, filed Apr. 21, 2001, both of which are hereby incorporated by reference in their entirety.

### REFERENCE TO SEQUENCE LISTING ON COMPACT DISC

[0002] This application refers to a “Sequence Listing” listed below, which is provided as an electronic document on three identical compact discs (CD-R), labeled “Copy 1,” “Copy 2,” and “CRF.” These compact discs each contain the file “06832.0018-02 Sequence listing.txt” (2,881,536 bytes, created on Oct. 8, 2006), which is incorporated by reference in its entirety.

### BACKGROUND OF THE INVENTION

[0003] The invention relates generally to Therapeutic proteins (including, but not limited to, a polypeptide, antibody, or peptide, or fragments and variants thereof) fused to albumin or fragments or variants of albumin. The invention further relates to Therapeutic proteins (including, but not limited to, a polypeptide, antibody, or peptide, or fragments and variants thereof) fused to albumin or fragments or variants of albumin, that exhibit extended shelf-life and/or extended or therapeutic activity in solution. These fusion proteins are herein collectively referred to as “albumin fusion proteins of the invention.” The invention encompasses therapeutic albumin fusion proteins, compositions, pharmaceutical compositions, formulations and kits. Nucleic acid molecules encoding the albumin fusion proteins of the invention are also encompassed by the invention, as are vectors containing these nucleic acids, host cells transformed with these nucleic acids vectors, and methods of making the albumin fusion proteins of the invention using these nucleic acids, vectors, and/or host cells.

[0004] The invention is also directed to methods of in vitro stabilizing a Therapeutic protein via fusion or conjugation of the Therapeutic protein to albumin or fragments or variants of albumin.

[0005] Human serum albumin (HSA, or HA), a protein of 585 amino acids in its mature form (as shown in FIG. 15 or in SEQ ID NO:18), is responsible for a significant proportion of the osmotic pressure of serum and also functions as a carrier of endogenous and exogenous ligands. At present, HA for clinical use is produced by extraction from human blood. The production of recombinant HA (rHA) in microorganisms has been disclosed in EP 330 451 and EP 361 991.

[0006] The role of albumin as a carrier molecule and its inert nature are desirable properties for use as a carrier and transporter of polypeptides in vivo. The use of albumin as a component of an albumin fusion protein as a carrier for various proteins has been suggested in WO 93/15199, WO 93/15200, and EP 413 622. The use of N-terminal fragments of HA for fusions to polypeptides has also been proposed (EP 399 666). Fusion of albumin to the Therapeutic protein may be achieved by genetic manipulation, such that the DNA coding for HA, or a fragment thereof, is joined to the DNA coding for the Therapeutic protein. A suitable host is then transformed or transfected with the fused nucleotide sequences, so arranged on a suitable plasmid as to express a fusion polypeptide. The expression may be effected in vitro from, for example, prokaryotic or eukaryotic cells, or in vivo e.g. from a transgenic organism.

[0007] Therapeutic proteins in their native state or when recombinantly produced, such as interferons and growth hormones, are typically labile molecules exhibiting short shelf-lives, particularly when formulated in aqueous solutions. The instability in these molecules when formulated for administration dictates that many of the molecules must be lyophilized and refrigerated at all times during storage, thereby rendering the molecules difficult to transport and/or store. Storage problems are particularly acute when pharmaceutical formulations must be stored and dispensed outside of the hospital environment. Many protein and peptide drugs also require the addition of high concentrations of other protein such as albumin to reduce or prevent loss of protein due to binding to the container. This is a major concern with respect to proteins such as IFN. For this reason, many Therapeutic proteins are formulated in combination with large proportion of albumin carrier molecule (100-1000 fold excess), though this is an undesirable and expensive feature of the formulation.

[0008] Few practical solutions to the storage problems of labile protein molecules have been proposed. Accordingly, there is a need for stabilized, long lasting formulations of proteinaceous therapeutic molecules that are easily dispensed, preferably with a simple formulation requiring minimal post-storage manipulation.

### SUMMARY OF THE INVENTION

[0009] The present invention is based, in part, on the discovery that Therapeutic proteins may be stabilized to extend the shelf-life, and/or to retain the Therapeutic protein's activity for extended periods of time in solution, in vitro and/or in vivo, by genetically or chemically fusing or conjugating the Therapeutic protein to albumin or a fragment (portion) or variant of albumin, that is sufficient to stabilize the protein and/or its activity. In addition it has been determined that the use of albumin-fusion proteins or albumin conjugated proteins may reduce the need to formulate protein solutions with large excesses of carrier proteins (such as albumin, unfused) to prevent loss of Therapeutic proteins due to factors such as binding to the container.

[0010] The present invention encompasses albumin fusion proteins comprising a Therapeutic protein (e.g., a polypeptide, antibody, or peptide, or fragments and variants thereof) fused to albumin or a fragment (portion), or variant of albumin. The present invention also encompasses albumin fusion proteins comprising a Therapeutic protein (e.g., a polypeptide, antibody, or peptide, or fragments and variants thereof) fused to albumin or a fragment (portion) or variant of albumin, that is sufficient to prolong the shelf life of the Therapeutic protein, and/or stabilize the Therapeutic protein and/or its activity in solution (or in a pharmaceutical composition) in vitro and/or in vivo. Nucleic acid molecules encoding the albumin fusion proteins of the invention are also encompassed by the invention, as are vectors containing these nucleic acids, host cells transformed with these nucleic acids vectors, and methods of making the albumin fusion proteins of the invention and using these nucleic acids, vectors, and/or host cells.

[0011] The invention also encompasses pharmaceutical formulations comprising an albumin fusion protein of the invention and a pharmaceutically acceptable diluent or carrier. Such formulations may be in a kit or container. Such kit or container may be packaged with instructions pertaining to the extended shelf life of the Therapeutic protein. Such formulations may be used in methods of treating, preventing, ameliorating or diagnosing a disease or disease symptom in a patient, preferably a mammal, most preferably a human, comprising the step of administering the pharmaceutical formulation to the patient.

[0012] In other embodiments, the present invention encompasses methods of preventing treating, or ameliorating a disease or disorder. In preferred embodiments, the present invention encompasses a method of treating a disease or disorder listed in the “Preferred Indication Y” column of Table 1 comprising administering to a patient in which such treatment, prevention or amelioration is desired an albumin fusion protein of the invention that comprises a Therapeutic protein portion corresponding to a Therapeutic protein (or fragment or variant thereof) disclosed in the “Therapeutic Protein X” column of Table 1 (in the same row as the disease or disorder to be treated is listed in the “Preferred Indication Y” column of Table 1) in an amount effective to treat prevent or ameliorate the disease or disorder.

[0013] In another embodiment, the invention includes a method of extending the shelf life of a Therapeutic protein (e.g., a polypeptide, antibody, or peptide, or fragments and variants thereof) comprising the step of fusing or conjugating the Therapeutic protein to albumin or a fragment (portion) or variant of albumin, that is sufficient to extend the shelf-life of the Therapeutic protein. In a preferred embodiment, the Therapeutic protein used according to this method is fused to the albumin, or the fragment or variant of albumin. In a most preferred embodiment, the Therapeutic protein used according to this method is fused to albumin, or a fragment or variant of albumin, via recombinant DNA technology or genetic engineering.

[0014] In another embodiment, the invention includes a method of stabilizing a Therapeutic protein (e.g., a polypeptide, antibody, or peptide, or fragments and variants thereof) in solution, comprising the step of fusing or conjugating the Therapeutic protein to albumin or a fragment (portion) or variant of albumin, that is sufficient to stabilize the Therapeutic protein. In a preferred embodiment, the Therapeutic protein used according to this method is fused to the albumin, or the fragment or variant of albumin. In a most preferred embodiment, the Therapeutic protein used according to this method is fused to albumin, or a fragment or variant of albumin, via recombinant DNA technology or genetic engineering.

[0015] The present invention further includes transgenic organisms modified to contain the nucleic acid molecules of the invention, preferably modified to express the albumin fusion proteins encoded by the nucleic acid molecules.

### BRIEF DESCRIPTION OF THE FIGURES

[0016] FIG. 1 depicts the extended shelf-life of an HA fusion protein in terms of the biological activity (Nb2 cell proliferation) of HA-hGH remaining after incubation in cell culture media for up to 5 weeks at 37° C. Under these conditions, hGH has no observed activity by week 2.

[0017] FIG. 2 depicts the extended shelf-life of an HA fusion protein in terms of the stable biological activity (Nb2 cell proliferation) of HA-hGH remaining after incubation in cell culture media for up to 3 weeks at 4, 37, or 50° C. Data is normalized to the biological activity of hGH at time zero.

[0018] FIGS. 3A and 3B compare the biological activity of HA-hGH with hGH in the Nb2 cell proliferation assay. FIG. 3A shows proliferation after 24 hours of incubation with various concentrations of hGH or the albumin fusion protein, and FIG. 3B shows proliferation after 48 hours of incubation with various concentrations of hGH or the albumin fusion protein.

[0019] FIG. 4 shows a map of a plasmid (pPPC0005) that can be used as the base vector into which polynucleotides encoding the Therapeutic proteins (including polypeptide and fragments and variants thereof) may be cloned to form HA-fusions. Plasmid Map key: PRB1p: PRB1 S. cerevisiae promoter; FL: Fusion leader sequence; rHA: cDNA encoding HA, ADH1t: ADH1 S. cerevisiae terminator; T3: T3 sequencing primer site; T7: T7 sequencing primer site; Amp R: β-lactamase gene; ori: origin of replication. Please note that in the provisional applications to which this application claims priority, the plasmid in FIG. 4 was labeled pPPC0006, instead of pPPC0005. In addition the drawing of this plasmid did not show certain pertinent restriction sites in this vector. Thus in the present application, the drawing is labeled pPPC0005 and more restriction sites of the same vector are shown.

[0020] FIG. 6 compares the recovery of vial-stored HA-IFN solutions of various concentrations with a stock solution after 48 or 72 hours of storage.

[0021] FIG. 6 compares the activity of an HA-α-IFN fusion protein after administration to monkeys via IV or SC.

[0022] FIG. 7 describes the bioavailability and stability of an HA-α-IFN fusion protein.

[0023] FIG. 8 is a map of an expression vector for the production of HA-α-IFN.

[0024] FIG. 9 shows the location of loops in HA.

[0025] FIG. 10 is an example of the modification of an HA loop.

[0026] FIG. 11 is a representation of the HA loops.

[0027] FIG. 12 shows the HA loop IV.

[0028] FIG. 13 shows the tertiary structure of HA.

[0029] FIG. 14 shows an example of a scFv-HA fusion

[0030] FIG. 15 shows the amino acid sequence of the mature form of human albumin (SEQ ID NO:18) and a polynucleotide encoding it (SEQ ID NO:17).

### DETAILED DESCRIPTION

[0031] As described above, the present invention is based, in part, on the discovery that a Therapeutic protein (e.g., a polypeptide, antibody, or peptide, or fragments and variants thereof) may be stabilized to extend the shelf-life and/or retain the Therapeutic protein's activity for extended periods of time in solution (or in a pharmaceutical composition) in vitro and/or in vivo, by genetically fusing or chemically conjugating the Therapeutic protein, polypeptide or peptide to all or a portion of albumin sufficient to stabilize the protein and its activity.

[0032] The present invention relates generally to albumin fusion proteins and methods of treating, preventing, or ameliorating diseases or disorders. As used herein, “albumin fusion protein” refers to a protein formed by the fusion of at least one molecule of albumin (or a fragment or variant thereof) to at least one molecule of a Therapeutic protein (or fragment or variant thereof). An albumin fusion protein of the invention comprises at least a fragment or variant of a Therapeutic protein and at least a fragment or variant of human serum albumin, which are associated with one another, preferably by genetic fusion (i.e., the albumin fusion protein is generated by translation of a nucleic acid in which a polynucleotide encoding all or a portion of a Therapeutic protein is joined in-frame with a polynucleotide encoding all or a portion of albumin) or chemical conjugation to one another. The Therapeutic protein and albumin protein, once part of the albumin fusion protein, may be referred to as a “portion”, “region” or “moiety” of the albumin fusion protein (e.g., a “Therapeutic protein portion” or an “albumin protein portion”).

[0033] In one embodiment, the invention provides an albumin fusion protein comprising, or alternatively consisting of, a Therapeutic protein (e.g., as described in Table 1) and a serum albumin protein. In other embodiments, the invention provides an albumin fusion protein comprising, or alternatively consisting of, a biologically active and/or therapeutically active fragment of a Therapeutic protein and a serum albumin protein. In other embodiments, the invention provides an albumin fusion protein comprising, or alternatively consisting of, a biologically active and/or therapeutically active variant of a Therapeutic protein and a serum albumin protein. In preferred embodiments, the serum albumin protein component of the albumin fusion protein is the mature portion of serum albumin.

[0034] In further embodiments, the invention provides an albumin fusion protein comprising, or alternatively consisting of, a Therapeutic protein, and a biologically active and/or therapeutically active fragment of serum albumin. In further embodiments, the invention provides an albumin fusion protein comprising, or alternatively consisting of, a Therapeutic protein and a biologically active and/or therapeutically active variant of serum albumin. In preferred embodiments, the Therapeutic protein portion of the albumin fusion protein is the mature portion of the Therapeutic protein. In a further preferred embodiment, the Therapeutic protein portion of the albumin fusion protein is the extracellular soluble domain of the Therapeutic protein. In an alternative embodiment, the Therapeutic protein portion of the albumin fusion protein is the active form of the Therapeutic protien.

[0035] In further embodiments, the invention provides an albumin fusion protein comprising, or alternatively consisting of, a biologically active and/or therapeutically active fragment or variant of a Therapeutic protein and a biologically active and/or therapeutically active fragment or variant of serum albumin. In preferred embodiments, the invention provides an albumin fusion protein comprising, or alternatively consisting of, the mature portion of a Therapeutic protein and the mature portion of serum albumin.

[0036] Therapeutic Proteins

[0037] As stated above, an albumin fusion protein of the invention comprises at least a fragment or variant of a Therapeutic protein and at least a fragment or variant of human serum albumin, which are associated with one another, preferably by genetic fusion or chemical conjugation.

[0038] As used herein, “Therapeutic protein” refers to proteins, polypeptides, antibodies, peptides or fragments or variants thereof, having one or more therapeutic and/or biological activities. Therapeutic proteins encompassed by the invention include but are not limited to, proteins, polypeptides, peptides, antibodies, and biologics. (The terms peptides, proteins, and polypeptides are used interchangeably herein.) It is specifically contemplated that the term “Therapeutic protein” encompasses antibodies and fragments and variants thereof. Thus an albumin fusion protein of the invention may contain at least a fragment or variant of a Therapeutic protein, and/or at least a fragment or variant of an antibody. Additionally, the term “Therapeutic protein” may refer to the endogenous or naturally occurring correlate of a Therapeutic protein.

[0039] By a polypeptide displaying a “therapeutic activity” or a protein that is “therapeutically active” is meant a polypeptide that possesses one or more known biological and/or therapeutic activities associated with a therapeutic protein such as one or more of the Therapeutic proteins described herein or otherwise known in the art. As a non-limiting example, a “Therapeutic protein” is a protein that is useful to treat, prevent or ameliorate a disease, condition or disorder. As a non-limiting example, a “Therapeutic protein” may be one that binds specifically to a particular cell type (normal (e.g., lymphocytes) or abnormal e.g., (cancer cells)) and therefore may be used to target a compound (drug, or cytotoxic agent) to that cell type specifically.

[0040] In another non-limiting example, a “Therapeutic protein” is a protein that has a biological activity, and in particular, a biological activity that is useful for treating preventing or ameliorating a disease. A non-inclusive list of biological activities that may be possessed by a Therapeutic protein includes, enhancing the immune response, promoting angiogenesis, inhibiting angiogenesis, regulating hematopoietic functions, stimulating nerve growth, enhancing an immune response, inhibiting an immune response, or any one or more of the biological activities described in the “Biological Activities” section below.

[0041] As used herein, “therapeutic activity” or “activity” may refer to an activity whose effect is consistent with a desirable therapeutic outcome in humans, or to desired effects in non-human mammals or in other species or organisms. Therapeutic activity may be measured in vivo or in vitro. For example, a desirable effect may be assayed in cell culture. As an example, when hGH is the Therapeutic protein, the effects of hGH on cell proliferation as described in Example 1 may be used as the endpoint for which therapeutic activity is measured. Such in vitro or cell culture assays are commonly available for many Therapeutic proteins as described in the art. Examples of assays include, but are not limited to those described herein in the Examples section or in the “Exemplary Activity Assay” column of Table 1.

[0042] Therapeutic proteins corresponding to a Therapeutic protein portion of an albumin fusion protein of the invention, such as cell surface and secretory proteins, are often modified by the attachment of one or more oligosaccharide groups. The modification, referred to as glycosylation, can dramatically affect the physical properties of proteins and can be important in protein stability, secretion, and localization. Glycosylation occurs at specific locations along the polypeptide backbone. There are usually two major types of glycosylation: glycosylation characterized by O-linked oligosaccharides, which are attached to serine or threonine residues; and glycosylation characterized by N-linked oligosaccharides, which are attached to asparagine residues in an Asn-X-Ser/Thr sequence, where X can be any amino acid except proline. N-acetylneuramic acid (also known as sialic acid) is usually the terminal residue of both N-linked and O-linked oligosaccharides. Variables such as protein structure and cell type influence the number and nature of the carbohydrate units within the chains at different glycosylation sites. Glycosylation isomers are also common at the same site within a given cell type.

[0043] For example, several types of human interferon are glycosylated. Natural human interferon-α2 is O-glycosylated at threonine 106, and N-glycosylation occurs at asparagine 72 in interferon-α14 (Adolf et al., J. Biochem 276:511 (1991); Nyman T A et al., J. Biochem 329:295 (1998)). The oligosaccharides at asparagine 80 in natural interferon-β1α may play an important factor in the solubility and stability of the protein, but may not be essential for its biological activity. This permits the production of an unglycosylated analog (interferon-β1b) engineered with sequence modifications to enhance stability (Hosoi et al., J. Interferon Res. 8:375 (1988; Karpusas et al., Cell Mol Life Sci 54:1203 (1998); Knight, J. Interferon Res. 2:421 (1982); Runkel et al., Pharm Res 15:641 (1998); Lin. Dev. Biol. Stand. 96:97 (1998)). Interferon-γ contains two N-linked oligosaccharide chains at positions 25 and 97, both important for the efficient formation of the bioactive recombinant protein, and having an influence on the pharmacokinetic properties of the protein (Sareneva et al., Eur. J. Biochem 242:191 (1996); Sareneva et al,. Biochem J. 303:831 (1994); Sareneva et al., J. Interferon Res. 13:267 (1993)). Mixed O-linked and N-linked glycosylation also occurs, for example in human erythropoietin, N-linked glycosylation occurs at asparagine residues located at positions 24, 38 and 83 while O-linked glycosylation occurs at a serine residue located at position 126 (Lai et al., J. Biol. Chem. 261:3116 (1986); Broudy et al., Arch. Biochem. Biophys. 265:329 (1988)).

[0044] Therapeutic proteins corresponding to a Therapeutic protein portion of an albumin fusion protein of the invention, as well as analogs and variants thereof, may be modified so that glycosylation at one or more sites is altered as a result of manipulation(s) of their nucleic acid sequence, by the host cell in which they are expressed, or due to other conditions of their expression. For example, glycosylation isomers may be produced by abolishing or introducing glycosylation sites, e.g., by substitution or deletion of amino acid residues, such as substitution of glutamine for asparagine, or unglycosylated recombinant proteins may be produced by expressing the proteins in host cells that will not glycosylate them, e.g. in E. coli or glycosylation-deficient yeast. These approaches are described in more detail below and are known in the art.

[0045] Therapeutic proteins (particularly those disclosed in Table 1) and their nucleic acid sequences are well known in the art and available in public databases such as Chemical Abstracts Services Databases (e.g., the CAS Registry), GenBank, and GenSeq as shown in Table 1.

[0046] Additional Therapeutic proteins corresponding to a Therapeutic protein portion of an albumin fusion protein of the invention include, but are not limited to, one or more of the Therapeutic proteins or peptides disclosed in the “Therapeutic Protein X” column of Table 1, or fragment or variable thereof.

[0047] Table 1 provides a non-exhaustive list of Therapeutic proteins that correspond to a Therapeutic protein portion of an albumin fusion protein of the invention. The “Therapeutic Protein X” column discloses Therapeutic protein molecules followed by parentheses containing scientific and brand names that comprise, or alternatively consist of, that Therapeutic protein molecule or a fragment or variant thereof. “Therapeutic protein X” as used herein may refer either to an individual Therapeutic protein molecule (as defined by the amino acid sequence obtainable from the CAS and Genbank accession numbers), or to the entire group of Therapeutic proteins associated with a given Therapeutic protein molecule disclosed in this column. The “Exemplary Identifier” column provides Chemical Abstracts Services (CAS) Registry Numbers (published by the American Chemical Society) and/or Genbank Accession Numbers ((e.g., Locus ID, NP_XXXXX (Reference Sequence Protein), and XP_XXXXX (Model Protein) identifiers available through the national Center for Biotechnology Information (NCBI) webpage at www.ncbi.nlm.nih.gov) that correspond to entries in the CAS Registry or Genbank database which contain an amino acid sequence of the Therapeutic Protein Molecule or of a fragment or variant of the Therapeutic Protein Molecule. In addition GenSeq Accession numbers and/or journal publication citations are given to identify the exemplary amino acid sequence for some polypeptides. The summary pages associated with each of these CAS and Genbank and GenSeq Accession Numbers as well as the cited journal publications (e.g., PubMed ID number (PMID)) are each incorporated by reference in their entireties, particularly with respect to the amino acid sequences described therein. The “PCT/Patent Reference” column provides U.S. Patent numbers, or PCT International Publication Numbers corresponding to patents and/or published patent applications that describe the Therapeutic protein molecule. Each of the patents and/or published patent applications cited in the “PCT/Patent Reference” column are herein incorporated by reference in their entireties. In particular, the amino acid sequences of the specified polypeptide set forth in the sequence listing of each cited “PCT/Patent Reference”, the variants of these amino acid sequences (mutations, fragments, etc.) set forth, for example, in the detailed description of each cited “PCT/Patent Reference”, the therapeutic indications set forth, for example, in the detailed description of each cited “PCT/Patent Reference”, and the activity asssays for the specified polypeptide set forth in the detailed description, and more particularly, the examples of each cited “PCT/Patent Reference” are incorporated herein by reference. The “Biological activity” column describes Biological activities associated with the Therapeutic protein molecule. The “Exemplary Activity Assay” column provides references that describe assays which may be used to test the therapeutic and/or biological activity of a Therapeutic protein or an albumin fusion protein of the invention comprising a Therapeutic protein X portion. Each of the references cited in the “Exemplary Activity Assay” column are herein incorporated by reference in their entireties, particularly with respect to the description of the respective activity assay described in the reference (see Methods section, for example) for assaying the corresponding biological activity set forth in the “Biological Activity” column of Table 1. The “Preferred Indication Y” column describes disease, disorders, and/or conditions that may be treated, prevented, diagnosed, or ameliorated by Therapeutic protein X or an albumin fusion protein of the invention comprising a Therapeutic protein X portion.

[0048] The recitation of “Cancer” in the “Preferred Indication Y” column indicates that corresponding Therapeutic protein, fusion protein containing the Therapeutic protein, and fragments and variants thereof, may be used for example, to diagnose, treat, prevent, and/or ameliorate diseases and/or disorders relating to neoplastic diseases (e.g., leukemias, cancers, and/or as described below under “Hyperproliferative Disorders”).

[0049] In specific embodiments, a Therapeutic protein having a “Cancer” recitation in the “Preferred Indication” column of Table 1, an albumin fusion protein that comprises a Therapeutic protein portion corresponding to this Therapeutic protein, and fragments and variants thereof, may be used for example, to diagnose, treat, prevent, and/or ameliorate a neoplasm located in a tissue selected from the group consisting of: colon, abdomen, bone, breast, digestive system, liver, pancreas, prostate, peritoneum, lung, blood (e.g., leukemia), endocrine glands (adrenal, parathyroid, pituitary, testicles, ovary, thymus, thyroid), uterus, eye, head and neck, nervous (central and peripheral), lymphatic system, pelvic, skin, soft tissue, spleen, thoracic, and urogenital.

[0050] In specific embodiments, a Therapeutic protein having a “Cancer” recitation in the “Preferred Indication” column of Table 1, an albumin fusion protein that comprises a Therapeutic protein portion corresponding to this Therapeutic protein, and fragments and variants thereof, may be used for example, to diagnose, treat, prevent, and/or ameliorate a pre-neoplastic condition, selected from the group consisting of: hyperplasia (e.g., endometrial hyperplasia and/or as described in the section entitled “Hyperproliferative Disorders”), metaplasia (e.g., connective tissue metaplasia, atypical metaplasia, and/or as described in the section entitled “Hyperproliferative Disorders”), and/or dysplasia (e.g., cervical dysplasia, and bronchopulmonary dysplasia).

[0051] In another specific embodiment, a Therapeutic protein having a “Cancer” recitation in the “Preferred Indication” column of Table 1, an albumin fusion protein that comprises a Therapeutic protein portion corresponding to this Therapeutic protein, and fragments and variants thereof, may be used for example, to diagnose, treat, prevent, and/or ameliorate a benign dysproliferative disorder selected from the group consisting of: benign tumors, fibrocystic conditions, tissue hypertrophy, and/or as described in the section entitled “Hyperproliferative Disorders”.

[0052] The recitation of “Immune/Hematopoietic” in the “Preferred Indication Y” column indicates that corresponding Therapeutic protein, fusion protein containing the Therapeutic protein, and fragments and variants thereof, may be used for example, to diagnose, treat, prevent, and/or ameliorate diseases and/or disorders relating to neoplastic diseases (e.g., as described below under “Hyperproliferative Disorders”), blood disorders (e.g., as described below under “Immune Activity” “Cardiovascular Disorders” and/or “Blood-Related Disorders”), and infections (e.g., as described below under “Infectious Disease”).

[0053] In specific embodiments, a Therapeutic protein having a “Immune/Hematopoietic” recitation in the “Preferred Indication” column of Table 1, a fusion protein containing this Therapeutic protein, and fragments and variants thereof, may be used for example, to diagnose, treat, prevent, and/or ameliorate a disease or disorder selected from the group consisting of: anemia, pancytopenia, leukopenia, thrombocytopenia, leukemias, Hodgkin's disease, non-Hodgkin's lymphoma, acute lymphocytic anemia (ALL), plasmacytomas, multiple myeloma, Burkitt's lymphoma, arthritis, asthma, AIDS, autoimmune disease, rheumatoid arthritis, granulomatous disease, immune deficiency, inflammatory bowel disease, sepsis, neutropenia, neutrophilia, psoriasis, immune reactions to transplanted organs and tissues, systemic lupus erythematosis, hemophilia, hypercoagulation, diabetes mellitus, endocarditis, meningitis, Lyme Disease, and allergies.

[0054] The recitation of “Reproductive” in the “Preferred Indication Y” column indicates that corresponding Therapeutic protein, fusion protein containing the Therapeutic protein, and fragments and variants thereof, may be used for example, to diagnose, treat, prevent, and/or ameliorate diseases and/or disorders relating to neoplastic diseases (e.g., as described below under “Hyperproliferative Disorders”), and disorders of the reproductive system (e.g., as described below under “Reproductive System Disorders”).

[0055] In specific embodiments, a Therapeutic protein having a “Reproductive” recitation in the “Preferred Indication” column of Table 1, a fusion protein containing this Therapeutic protein, and fragments and variants thereof, may be used for example, to diagnose, treat, prevent, and/or ameliorate a disease or disorder selected from the group consisting of: cryptorchism, prostatitis, inguinal hernia, varicocele, leydig cell tumors, verrucous carcinoma, prostatitis, malacoplakia, Peyronie's disease, penile carcinoma, squamous cell hyperplasia, dysmenorrhea, ovarian adenocarcinoma, Turner's syndrome, mucopurulent cervicitis, Sertoli-leydig tumors, ovarian cancer, uterine cancer, pelvic inflammatory disease, testicular cancer, prostate cancer, Klinefelter's syndrome, Young's syndrome, premature ejaculation, diabetes mellitus, cystic fibrosis, Kartagener's syndrome, testicular atrophy, testicular feminization, anorchia, ectopic testis, epididymitis, orchitis, gonorrhea, syphilis, testicular torsion, vasitis nodosa, germ cell tumors, stromal tumors, dysmenorrhea, retroverted uterus, endometriosis, fibroids, adenomyosis, anovulatory bleeding, amenorrhea, Cushing's syndrome, hydatidiform moles, Asherman's syndrome, premature menopause, precocious puberty, uterine polyps, dysfunctional uterine bleeding, cervicitis, chronic cervicitis, mucopurulent cervicitis, cervical dysplasia, cervical polyps, Nabothian cysts, cervical erosion, cervical incompetence, cervical neoplasms, pseudohermaphroditism, and premenstrual syndrome.

[0056] The recitation of “Musculoskeletal” in the “Preferred Indication Y” column indicates that corresponding Therapeutic protein, fusion protein containing the Therapeutic protein, and fragments and variants thereof, may be used for example, to diagnose, treat, prevent, and/or ameliorate diseases and/or disorders relating to neoplastic diseases (e.g., as described below under “Hyperproliferative Disorders”), and disorders of the immune system (e.g., as described below under “Immune Activity”).

[0057] In specific embodiments, a Therapeutic protein having a “Musculoskeletal” recitation in the “Preferred Indication” column of Table 1, a fusion protein containing this Therapeutic protein, and fragments and variants thereof, may be used for example, to diagnose, treat, prevent, and/or ameliorate a disease or disorder selected from the group consisting of: bone cancers (e.g., osteochondromas, benign chondromas, chondroblastoma, chondromyxoid fibromas, osteoid osteomas, giant cell tumors, multiple myeloma, osteosarcomas), Paget's Disease, rheumatoid arthritis, systemic lupus erythematosus, osteomyelitis, Lyme Disease, gout, bursitis, tendonitis, osteoporosis, osteoarthritis, muscular dystrophy, mitochondrial myopathy, cachexia, and multiple sclerosis.

[0058] The recitation of “Cardiovascular” in the “Preferred Indication Y” column indicates that corresponding Therapeutic protein, fusion protein containing the Therapeutic protein, and fragments and variants thereof, may be used for example, to diagnose, treat, prevent, and/or ameliorate diseases and/or disorders relating to neoplastic diseases (e.g., as described below under “Hyperproliferative Disorders”), and disorders of the cardiovascular system (e.g., as described below under “Cardiovascular Disorders”).

[0059] In specific embodiments, a Therapeutic protein having a “Cardiovascular” recitation in the “Preferred Indication” column of Table 1, a fusion protein containing this Therapeutic protein, and fragments and variants thereof, may be used for example, to diagnose, treat, prevent, and/or ameliorate a disease or disorder selected from the group consisting of: myxomas, fibromas, rhabdomyomas, cardiovascular abnormalities (e.g., congenital heart defects, cerebral arteriovenous malformations, septal defects), heart disease (e.g., heart failure, congestive heart disease, arrhythmia, tachycardia, fibrillation, pericardial Disease, endocarditis), cardiac arrest, heart valve disease (e.g., stenosis, regurgitation, prolapse), vascular disease (e.g.,.hypertension, coronary artery disease, angina, aneurysm, arteriosclerosis, peripheral vascular disease), hyponatremia, hypematremia, hypokalemia, and hyperkalemia.

[0060] The recitation of “Mixed Fetal” in the “Preferred Indication Y” column indicates that corresponding Therapeutic protein, fusion protein containing the Therapeutic protein, and fragments and variants thereof, may be used for example, to diagnose, treat, prevent, and/or ameliorate diseases and/or disorders relating to neoplastic diseases (e.g., as described below under “Hyperproliferative Disorders”).

[0061] In specific embodiments, a Therapeutic protein having a “Mixed Fetal” recitation in the “Preferred Indication” column of Table 1, an albumin fusion protein that comprises a Therapeutic protein portion corresponding to this Therapeutic protein, and fragments and variants thereof, may be used for example, to diagnose, treat, prevent, and/or ameliorate a disease or disorder selected from the group consisting of: spina bifida, hydranencephaly, neurofibromatosis, fetal alcohol syndrome, diabetes mellitus, PKU, Down's syndrome, Patau syndrome, Edwards syndrome, Turner syndrome, Apert syndrome, Carpenter syndrome, Conradi syndrome, Crouzon syndrome, cutis laxa, Cornelia de Lange syndrome, Ellis-van Creveld syndrome, Holt-Oram syndrome, Kartagener syndrome, Meckel-Gruber syndrome, Noonan syndrome, Pallister-Hall syndrome, Rubinstein-Taybi syndrome, Scimitar syndrome, Smith-Lemli-Opitz syndrome, thromocytopenia-absent radius (TAR) syndrome, Treacher Collins syndrome, Williams syndrome, Hirschsprung's disease, Meckel's diverticulum, polycystic kidney disease, Turner's syndrome, and gonadal dysgenesis, Klippel-Feil syndrome, Ostogenesis imperfecta, muscular dystrophy, Tay-Sachs disease, Wilm's tumor, neuroblastoma, and retinoblastoma.

[0062] The recitation of “Excretory” in the “Preferred Indication Y” column indicates that corresponding Therapeutic protein, fusion protein containing the Therapeutic protein, and fragments and variants thereof, may be used for example, to diagnose, treat, prevent, and/or ameliorate diseases and/or disorders relating to neoplastic diseases (e.g., as described below under “Hyperproliferative Disorders”) and renal disorders (e.g., as described below under “Renal Disorders”).

[0063] In specific embodiments, a Therapeutic protein having a “Excretory” recitation in the “Preferred Indication” column of Table 1, an albumin fusion protein that comprises a Therapeutic protein portion corresponding to this Therapeutic protein, and fragments and variants thereof, may be used for example, to diagnose, treat, prevent, and/or ameliorate a disease or disorder selected from the group consisting of: bladder cancer, prostate cancer, benign prostatic hyperplasia, bladder disorders (e.g., urinary incontinence, urinary retention, urinary obstruction, urinary tract Infections, interstitial cystitis, prostatitis, neurogenic bladder, hematuria), renal disorders (e.g., hydronephrosis, proteinuria, renal failure, pyelonephritis, urolithiasis, reflux nephropathy, and unilateral obstructive uropathy).

[0064] The recitation of “Neural/Sensory” in the “Preferred Indication Y” column indicates that corresponding Therapeutic protein, fusion protein containing the Therapeutic protein, and fragments and variants thereof, may be used for example, to diagnose, treat, prevent, and/or ameliorate diseases and/or disorders relating to neoplastic diseases (e.g., as described below under “Hyperproliferative Disorders”) and diseases or disorders of the nervous system (e.g., as described below under “Neural Activity and Neurological Diseases”).

[0065] In specific embodiments, a Therapeutic protein having a “Neurat/Sensory” recitation in the “Preferred Indication” column of Table 1, an albumin fusion protein that comprises a Therapeutic protein portion corresponding to this Therapeutic protein, and fragments and variants thereof, may be used for example, to diagnose, treat, prevent, and/or ameliorate a disease or disorder selected from the group consisting of: brain cancer (e.g., brain stem glioma, brain tumors, central nervous system (Primary) lymphoma, central nervous system lymphoma, cerebellar astrocytoma, and cerebral astrocytoma, neurodegenerative disorders (e.g., Alzheimer's Disease, Creutzfeldt-Jakob Disease, Parkinson's Disease, and Idiopathic Presenile Dementia), encephalomyelitis, cerebral malaria, meningitis, metabolic brain diseases (e.g., phenylketonuria and pyruvate carboxylase deficiency), cerebellar ataxia, ataxia telangiectasia, and AIDS Dementia Complex, schizophrenia, attention deficit disorder, hyperactive attention deficit disorder, autism, and obsessive compulsive disorders.

[0066] The recitation of “Respiratory” in the “Preferred Indication Y” column indicates that corresponding Therapeutic protein, fusion protein containing the Therapeutic protein, and fragments and variants thereof, may be used for example, to diagnose, treat, prevent, and/or ameliorate diseases and/or disorders relating to neoplastic diseases (e.g., as described below under “Hyperproliferative Disorders”) and diseases or disorders of the respiratory system (e.g., as described below under “Respiratory Disorders”).

[0067] In specific embodiments, a Therapeutic protein having a “Respiratory” recitation in the “Preferred Indication” column of Table 1, an albumin fusion protein that comprises a Therapeutic protein portion corresponding to this Therapeutic protein, and fragments and variants thereof, may be used for example, to diagnose, treat, prevent, and/or ameliorate a disease or disorder selected from the group consisting of: cancers of the respiratory system such as larynx cancer, pharynx cancer, trachea cancer, epiglottis cancer, lung cancer, squamous cell carcinomas, small cell (oat cell) carcinomas, large cell carcinomas, and adenocarcinomas. Allergic reactions, cystic fibrosis, sarcoidosis, histiocytosis X, infiltrative lung diseases (e.g., pulmonary fibrosis and lymphoid interstitial pneumonia), obstructive airway diseases (e.g., asthma, emphysema, chronic or acute bronchitis), occupational lung diseases (e.g., silicosis and asbestosis), pneumonia, and pleurisy.

[0068] The recitation of “Endocrine” in the “Preferred Indication Y” column indicates that corresponding Therapeutic protein, fusion protein containing the Therapeutic protein, and fragments and variants thereof, may be used for example, to diagnose, treat, prevent, and/or ameliorate diseases and/or disorders relating to neoplastic diseases (e.g., as described below under “Hyperproliferative Disorders”) and diseases or disorders of the respiratory system (e.g., as described below under “Respiratory Disorders”), renal disorders (e.g., as described below under “Renal Disorders”), and disorders of the endocrine system (e.g., as described below under “Endocrine Disorders”.

[0069] In specific embodiments, a Therapeutic protein having a “Endocrine” recitation in the “Preferred Indication” column of Table 1, an albumin fusion protein that comprises a Therapeutic protein portion corresponding to this Therapeutic protein, and fragments and variants thereof, may be used for example, to diagnose, treat, prevent, and/or ameliorate a disease or disorder selected from the group consisting of: cancers of endocrine tissues and organs (e.g., cancers of the hypothalamus, pituitary gland, thyroid gland, parathyroid glands, pancreas, adrenal glands, ovaries, and testes), diabetes (e.g., diabetes insipidus, type I and type II diabetes mellitus), obesity, disorders related to pituitary glands (e.g., hyperpituitarism, hypopituitarism, and pituitary dwarfism), hypothyroidism, hyperthyroidism, goiter, reproductive disorders (e.g. male and female infertility), disorders related to adrenal glands (e.g., Addison's Disease, corticosteroid deficiency, and Cushing's Syndrome), kidney cancer (e.g., hypernephroma, transitional cell cancer, and Wilm's tumor), diabetic nephropathy, interstitial nephritis, polycystic kidney disease, glomerulonephritis (e.g., IgM mesangial proliferative glomerulonephritis and glomerulonephritis caused by autoimmune disorders; such as Goodpasture's syndrome), and nephrocalcinosis.

[0070] The recitation of “Digestive” in the “Preferred Indication Y” column indicates that corresponding Therapeutic protein, fusion protein containing the Therapeutic protein, and fragments and variants thereof, may be used for example, to diagnose, treat, prevent, and/or ameliorate diseases and/or disorders relating to neoplastic diseases (e.g., as described below under “Hyperproliferative Disorders”) and diseases or disorders of the gastrointestinal system (e.g., as described below under “Gastrointestinal Disorders”.

[0071] In specific embodiments, a Therapeutic protein having a “Digestive” recitation in the “Preferred Indication” column of Table 1, an albumin fusion protein that comprises a Therapeutic protein portion corresponding to this Therapeutic protein, and fragments and variants thereof, may be used for example, to diagnose, treat, prevent, and/or ameliorate a disease or disorder selected from the group consisting of: ulcerative colitis, appendicitis, Crohn's disease, hepatitis, hepatic encephalopathy, portal hypertension, cholelithiasis, cancer of the digestive system (e.g., biliary tract cancer, stomach cancer, colon cancer, gastric cancer, pancreatic cancer, cancer of the bile duct, tumors of the colon (e.g., polyps or cancers), and cirrhosis), pancreatitis, ulcerative disease, pyloric stenosis, gastroenteritis, gastritis, gastric atropy, benign tumors of the duodenum, distension, irritable bowel syndrome, malabsorption, congenital disorders of the small intestine, bacterial and parasitic infection, megacolon, Hirschsprung's disease, aganglionic megacolon, acquired megacolon, colitis, anorectal disorders (e.g., anal fistulas, hemorrhoids), congenital disorders of the liver (e.g., Wilson's disease, hemochromatosis, cystic fibrosis, biliary atresia, and alpha1-antitrypsin deficiency), portal hypertension, cholelithiasis, and jaundice.

[0072] The recitation of “Connective/Epithelial” in the “Preferred Indication Y” column indicates that corresponding Therapeutic protein, fusion protein containing the Therapeutic protein, and fragments and variants thereof, may be used for example, to diagnose, treat, prevent, and/or ameliorate diseases and/or disorders relating to neoplastic diseases (e.g., as described below under “Hyperproliferative Disorders”), cellular and genetic abnormalities (e.g., as described below under “Diseases at the Cellular Level”), angiogenesis (e.g., as described below under “Anti-Angiogenesis Activity”), and or to promote or inhibit regeneration (e.g., as described below under “Regeneration”), and wound healing (e.g., as described below under “Wound Healing and Epithelial Cell Proliferation”).

[0073] In specific embodiments, a Therapeutic protein having a “Connective/Epithelial” recitation in the “Preferred Indication” column of Table 1, an albumin fusion protein that comprises a Therapeutic protein portion corresponding to this Therapeutic protein, and fragments and variants thereof, may be used for example, to diagnose, treat, prevent, and/or ameliorate a disease or disorder selected from the group consisting of: connective tissue metaplasia, mixed connective tissue disease, focal epithelial hyperplasia, epithelial metaplasia, mucoepithelial dysplasia, graft v. host disease, polymyositis, cystic hyperplasia, cerebral dysplasia, tissue hypertrophy, Alzheimer's disease, lymphoproliferative disorder, Waldenstron's macroglobulinemia, Crohn's disease, pernicious anemia, idiopathic Addison's disease, glomerulonephritis, bullous pemphigoid, Sjogren's syndrome, diabetes mellitus, cystic fibrosis, osteoblastoma, osteoclastoma, osteosarcoma, chondrosarcoma, osteoporosis, osteocarthritis, periodontal disease, wound healing, relapsing polychondritis, vasculitis, polyarteritis nodosa, Wegener's granulomatosis, cellulitis, rheumatoid arthritis, psoriatic arthritis, discoid lupus erythematosus, systemic lupus erythematosus, scleroderma, CREST syndrome, Sjogren's syndrome, polymyositis, dermatomyositis, mixed connective tissue disease, relapsing polychondritis, vasculitis, Henoch-Schonlein syndrome, erythema nodosum, polyarteritis nodosa, temporal (giant cell) arteritis, Takayasu's arteritis, Wegener's granulomatosis, Reiter's syndrome, Behcet's syndrome, ankylosing spondylitis, cellulitis, keloids, Ehler Danlos syndrome, Marfan syndrome, pseudoxantoma elasticum, osteogenese imperfecta, chondrodysplasias, epidermolysis bullosa, Alport syndrome, and cutis laxa.

TABLE 1

| | Exemplary | | |
|---|---|---|---|
| Therapeutic Protein X | Identifier | PCT/Patent Reference | Preferred Indication Y |
| HETFO52 | B03768 | US6066724-A | Neural/Sensory, Reproductive |
| HETEZ10 | B03769 | US6066724-A | Cancer |
| HLICR58 | B08775 | WO200052160-A1 | Cancer |
| HMCIS41 | B08776 | WO200052160-A1 | Cancer |
| HCESA34 | B08891 | WO200017222-A1 | Cancer |
| HCRMZ90 | B08892 | WO200017222-A1 | Cancer |
| HDPXQ54 | B08893 | WO200017222-A1 | Immune/Hematopoietic |
| HETCL11 | B08894 | WO200017222-A1 | Cancer |
| HFXDN34 | B08895 | WO200017222-A1 | Neural/Sensory |
| HKAAV24 | B08896 | WO200017222-A1 | Cancer |
| HMTBE31 | B08897 | WO200017222-A1 | Cancer |
| HRADL70 | B08898 | WO200017222-A1 | Excretory, Immune/Hematopoietic |
| HTXGG31 | B08899 | WO200017222-A1 | Cancer |
| HWHHL34 | B08900 | WO200017222-A1 | Cancer |
| HYAAY40 | B08901 | WO200017222-A1 | Immune/Hematopoietic |
| HPASA81 | B08902 | WO200017222-A1 | Digestive, Endocrine, Reproductive |
| HCNDA61 | B08903 | WO200017222-A1 | Digestive, Reproductive |
| HTHCZ41 | B08904 | WO200017222-A1 | Cancer |
| HKADJ17 | B08905 | WO200017222-A1 | Connective/Epithelial, Immune/Hematopoietic, |
| | | | Reproductive |
| HMSII78 | B08906 | WO200017222-A1 | Cancer |
| HCFBL76 | B08907 | WO200017222-A1 | Cancer |
| HFVHR84 | B08908 | WO200017222-A1 | Connective/Epithelial, Digestive |
| HIBCB67 | B08909 | WO200017222-A1 | Cancer |
| HCELI29 | B08910 | WO200017222-A1 | Cancer |
| HAHDZ77 | B08911 | WO200017222-A1 | Cardiovascular, Mixed Fetal |
| HDHMA45 | B08912 | WO200017222-A1 | Cardiovascular, Neural/Sensory |
| HELAW45 | B08913 | WO200017222-A1 | Cardiovascular |
| HFIAB31 | B08914 | WO200017222-A1 | Cancer |
| HLWBK05 | B08915 | WO200017222-A1 | Cancer |
| HLDBX13 | B08916 | WO200017222-A1 | Digestive |
| HMAGA15 | B08917 | WO200017222-A1 | Cancer |
| HMWFT53 | B08918 | WO200017222-A1 | Immune/Hematopoietic |
| HNFJD91 | B08919 | WO200017222-A1 | Cardiovascular, Connective/Epithelial, |
| | | | Immune/Hematopoietic |
| HTGCM55 | B08920 | WO200017222-A1 | Cardiovascular, Digestive, Immune/Hematopoietic |
| HTTEX77 | B08921 | WO200017222-A1 | Cancer |
| HFXDN34 | B08922 | WO200017222-A1 | Neural/Sensory |
| HDPMI18 | B08923 | WO200017222-A1 | Cancer |
| HETGL41 | B08924 | WO200017222-A1 | Cancer |
| HPASA81 | B08925 | WO200017222-A1 | Digestive, Endocrine, Reproductive |
| HCNDA61 | B08926 | WO200017222-A1 | Digestive, Reproductive |
| HTTEX77 | B08927 | WO200017222-A1 | Cancer |
| HFXDN34 | B08934 | WO200017222-A1 | Neural/Sensory |
| HETGL41 | B08935 | WO200017222-A1 | Cancer |
| HPASA81 | B08936 | WO200017222-A1 | Digestive, Endocrine, Reproductive |
| HCNDA61 | B08940 | WO200017222-A1 | Digestive, Reproductive |
| HTTEX77 | B08982 | WO200017222-A1 | Cancer |
| HAOAB14 | B12301 | WO200029422-A1 | Digestive, Musculoskeletal |
| HHFBY53 | B12302 | WO200029422-A1 | Cancer |
| HE2FE69 | B12303 | WO200029422-A1 | Cancer |
| HNHFI33 | B12305 | WO200029422-A1 | Immune/Hematopoietic |
| HAMFE15 | B12306 | WO200029422-A1 | Cancer |
| HAMFE82 | B12307 | WO200029422-A1 | Cancer |
| HCWEM59 | B12308 | WO200029422-A1 | Immune/Hematopoietic |
| HDPGE10 | B12309 | WO200029422-A1 | Immune/Hematopoietic |
| HDPGP94 | B12310 | WO200029422-A1 | Digestive, Immune/Hematopoietic |
| HFPBY77 | B12311 | WO200029422-A1 | Cancer |
| HFXHK32 | B12312 | WO200029422-A1 | Neural/Sensory |
| HMTAK05 | B12313 | WO200029422-A1 | Cancer |
| HMWDC93 | B12314 | WO200029422-A1 | Immune/Hematopoietic |
| HSPBY40 | B12315 | WO200029422-A1 | Cancer |
| HODDO08 | B12316 | WO200029422-A1 | Cancer |
| HCFNK47 | B12317 | WO200029422-A1 | Cancer |
| HE2FL70 | B12318 | WO200029422-A1 | Immune/Hematopoietic, Mixed Fetal, |
| | | | Neural/Sensory |
| H2MBY03 | B12319 | WO200029422-A1 | Cancer |
| HACBS38 | B12320 | WO200029422-A1 | Cancer |
| HAGFG51 | B12321 | WO200029422-A1 | Neural/Sensory |
| HBQAB44 | B12322 | WO200029422-A1 | Neural/Sensory, Reproductive, Respiratory |
| HHEMA59 | B12323 | WO200029422-A1 | Cancer |
| HJBAV55 | B12324 | WO200029422-A1 | Cancer |
| HLHEY02 | B12325 | WO200029422-A1 | Endocrine, Respiratory |
| HSAAO94 | B12326 | WO200029422-A1 | Cancer |
| HTXKP61 | B12327 | WO200029422-A1 | Cancer |
| HWABC21 | B12328 | WO200029422-A1 | Cancer |
| HWBDI30 | B12329 | WO200029422-A1 | Cancer |
| HYBAR26 | B12330 | WO200029422-A1 | Musculoskeletal |
| HAJAF57 | B12331 | WO200029422-A1 | Cancer |
| HAMFE15 | B12332 | WO200029422-A1 | Cancer |
| HAMFE82 | B12333 | WO200029422-A1 | Cancer |
| HAMFE15 | B12338 | WO200029422-A1 | Cancer |
| HAMFE82 | B12339 | WO200029422-A1 | Cancer |
| HLDOK36 | B15551 | WO200056752-A2 | Cancer |
| HDPBW68 | B15552 | WO200056752-A2 | Cancer |
| HHEFO24 | B15553 | WO200056752-A2 | Cardiovascular, Immune/Hematopoietic, |
| | | | Neural/Sensory |
| HEGAL46 | B15554 | WO200056752-A2 | Cancer |
| HFOYC02 | B15555 | WO200056752-A2 | Cancer |
| HDABV82 | B15556 | WO200056752-A2 | Cancer |
| HCEMU42 | B15557 | WO200056752-A2 | Cancer |
| HSIFO61 | B15558 | WO200056752-A2 | Cancer |
| HDPBW68 | B15559 | WO200056752-A2 | Cancer |
| HDPBW68 | B15562 | WO200056752-A2 | Cancer |
| HSIFO61 | B15566 | WO200056752-A2 | Cancer |
| HOEAL47 | B18715 | WO200054651-A2 | Cancer |
| HE9SF68 | B18755 | WO200055204-A1 | Cancer |
| HLICQ90 | B24437 | WO200035937-A1 | Cancer |
| HNTSM04 | B24438 | WO200035937-A1 | Cancer |
| HMCAL59 | B24439 | WO200035937-A1 | Cancer |
| HMACO04 | B24440 | WO200035937-A1 | Cancer |
| HMAHY59 | B24441 | WO200035937-A1 | Cancer |
| HFXLL52 | B24442 | WO200035937-A1 | Neural/Sensory |
| HKABY55 | B24443 | WO200035937-A1 | Cancer |
| HCQCF36 | B24444 | WO200035937-A1 | Digestive, Immune/Hematopoietic |
| HTADO22 | B24445 | WO200035937-A1 | Immune/Hematopoietic |
| HHFHD92 | B24446 | WO200035937-A1 | Cancer |
| HNGFW58 | B24447 | WO200035937-A1 | Cancer |
| HOEFV61 | B24448 | WO200035937-A1 | Cancer |
| HPIAQ68 | B24449 | WO200035937-A1 | Immune/Hematopoietic, Reproductive |
| HNFFY60 | B24450 | WO200035937-A1 | Cancer |
| HCE3H20 | B24451 | WO200035937-A1 | Cancer |
| HE8EW79 | B24452 | WO200035937-A1 | Cancer |
| HTTDF41 | B24453 | WO200035937-A1 | Cancer |
| HSSGJ45 | B24454 | WO200035937-A1 | Cancer |
| HLWBY76 | B24455 | WO200035937-A1 | Cancer |
| HDPBN34 | B24456 | WO200035937-A1 | Immune/Hematopoietic |
| HMSHY73 | B24457 | WO200035937-A1 | Cancer |
| HPRBF19 | B24458 | WO200035937-A1 | Cancer |
| HNFJE06 | B24459 | WO200035937-A1 | Immune/Hematopoietic, Musculoskeletal |
| HCHCF61 | B24460 | WO200035937-A1 | Reproductive |
| HBJLH40 | B24461 | WO200035937-A1 | Cancer |
| HDPMV72 | B24462 | WO200035937-A1 | Cancer |
| HEMFA84 | B24463 | WO200035937-A1 | Cancer |
| HTOHW95 | B24464 | WO200035937-A1 | Cancer |
| HUNAH63 | B24465 | WO200035937-A1 | Reproductive |
| HISBT59 | B24466 | WO200035937-A1 | Cancer |
| HNTAS52 | B24467 | WO200035937-A1 | Cancer |
| HRACM44 | B24468 | WO200035937-A1 | Excretory, Immune/Hematopoietic |
| HFPES77 | B24469 | WO200035937-A1 | Cancer |
| HUSXU29 | B24470 | WO200035937-A1 | Cancer |
| HOHBB49 | B24471 | WO200035937-A1 | Musculoskeletal |
| HRABX31 | B24472 | WO200035937-A1 | Excretory, Immune/Hematopoietic, |
| | | | Musculoskeletal |
| HROBD68 | B24473 | WO200035937-A1 | Cancer |
| HMHBE18 | B24474 | WO200035937-A1 | Cancer |
| HNHDY21 | B24475 | WO200035937-A1 | Immune/Hematopoietic |
| HOEBZ89 | B24476 | WO200035937-A1 | Cancer |
| HYAAJ71 | B24477 | WO200035937-A1 | Immune/Hematopoietic |
| HTEKS16 | B24478 | WO200035937-A1 | Connective/Epithelial, Mixed Fetal, Reproductive |
| HCUFX40 | B24479 | WO200035937-A1 | Immune/Hematopoietic |
| HCWDL75 | B24480 | WO200035937-A1 | Cardiovascular, Immune/Hematopoietic |
| HNHKJ57 | B24481 | WO200035937-A1 | Immune/Hematopoietic |
| HCMSS06 | B24482 | WO200035937-A1 | Cancer |
| HIBCE35 | B24483 | WO200035937-A1 | Cancer |
| HE8EW79 | B24484 | WO200035937-A1 | Cancer |
| HTTDF41 | B24485 | WO200035937-A1 | Cancer |
| HSSGJ45 | B24486 | WO200035937-A1 | Cancer |
| HCMSS06 | B24487 | WO200035937-A1 | Cancer |
| HCMSS06 | B24597 | WO200035937-A1 | Cancer |
| HAOAB64 | B25576 | WO200029435-A1 | Musculoskeletal, Reproductive |
| HOHCH55 | B25577 | WO200029435-A1 | Cancer |
| HTLEW81 | B25578 | WO200029435-A1 | Cancer |
| HARAO44 | B25579 | WO200029435-A1 | Neural/Sensory |
| HDPCL05 | B25580 | WO200029435-A1 | Immune/Hematopoietic |
| HDPUW68 | B25581 | WO200029435-A1 | Cancer |
| HOHBY69 | B25582 | WO200029435-A1 | Cancer |
| HCDDP40 | B25583 | WO200029435-A1 | Immune/Hematopoietic, Musculoskeletal |
| HUSAQ05 | B25585 | WO200029435-A1 | Cancer |
| HOUDJ81 | B25586 | WO200029435-A1 | Cancer |
| HPWCM76 | B25587 | WO200029435-A1 | Reproductive |
| HOHCH55 | B25588 | WO200029435-A1 | Cancer |
| HDPCL05 | B25589 | WO200029435-A1 | Immune/Hematopoietic |
| HOHBY69 | B25590 | WO200029435-A1 | Cancer |
| HUSAQ05 | B25592 | WO200029435-A1 | Cancer |
| HOUDJ81 | B25593 | WO200029435-A1 | Cancer |
| HUSAQ05 | B25618 | WO200029435-A1 | Cancer |
| HE8NG02 | B25665 | WO200043495-A2 | Mixed Fetal, Reproductive |
| HWBDM37 | B25666 | WO200043495-A2 | Digestive, Immune/Hematopoietic, Reproductive |
| HODFN71 | B25668 | WO200043495-A2 | Mixed Fetal, Reproductive |
| HODGE68 | B25669 | WO200043495-A2 | Reproductive |
| HCECN54 | B25670 | WO200043495-A2 | Excretory, Neural/Sensory |
| HE8UB86 | B25671 | WO200043495-A2 | Cancer |
| HNHKY10 | B25672 | WO200043495-A2 | Immune/Hematopoietic |
| HNHLB93 | B25673 | WO200043495-A2 | Immune/Hematopoietic |
| HNHON23 | B25674 | WO200043495-A2 | Immune/Hematopoietic, Musculoskeletal |
| HTEPG70 | B25675 | WO200043495-A2 | Reproductive |
| HNHOJ75 | B25676 | WO200043495-A2 | Immune/Hematopoietic |
| HDTIT10 | B25677 | WO200043495-A2 | Cancer |
| HKAOS84 | B25678 | WO200043495-A2 | Connective/Epithelial |
| HAPUC89 | B25679 | WO200043495-A2 | Cancer |
| HWAAD63 | B25680 | WO200043495-A2 | Endocrine, Excretory, Immune/Hematopoietic |
| HUCPD31 | B25681 | WO200043495-A2 | Cancer |
| HDQHD03 | B25682 | WO200043495-A2 | Immune/Hematopoietic, Neural/Sensory |
| HKAKK09 | B25683 | WO200043495-A2 | Connective/Epithelial, Digestive, Mixed Fetal |
| HOCNF19 | B25684 | WO200043495-A2 | Digestive |
| HTLIT32 | B25685 | WO200043495-A2 | Reproductive |
| HODEJ32 | B25686 | WO200043495-A2 | Reproductive |
| HNHMV54 | B25687 | WO200043495-A2 | Immune/Hematopoietic |
| HODEE95 | B25688 | WO200043495-A2 | Reproductive |
| HLHAM10 | B25689 | WO200043495-A2 | Cancer |
| HNHOG73 | B25690 | WO200043495-A2 | Immune/Hematopoietic |
| HBGNM47 | B25691 | WO200043495-A2 | Cancer |
| HAUBA08 | B25692 | WO200043495-A2 | Cancer |
| HYBBE75 | B25693 | WO200043495-A2 | Musculoskeletal |
| HTLGY87 | B25694 | WO200043495-A2 | Cancer |
| HNHPD10 | B25695 | WO200043495-A2 | Immune/Hematopoietic |
| HODEI83 | B25696 | WO200043495-A2 | Reproductive |
| HMUAI20 | B25697 | WO200043495-A2 | Cancer |
| HE9OW20 | B25698 | WO200043495-A2 | Immune/Hematopoietic, Mixed Fetal, |
| | | | Neural/Sensory |
| HDTIT10 | B25699 | WO200043495-A2 | Cancer |
| HWAAD63 | B25700 | WO200043495-A2 | Endocrine, Excretory, Immune/Hematopoietic |
| HWAAD63 | B25701 | WO200043495-A2 | Endocrine, Excretory, Immune/Hematopoietic |
| HEMCV19 | B25703 | WO200043495-A2 | Cancer |
| HEMCV19 | B25704 | WO200043495-A2 | Cancer |
| HEMCV19 | B25705 | WO200043495-A2 | Cancer |
| HAUBA08 | B25706 | WO200043495-A2 | Cancer |
| HEMCV19 | B25707 | WO200043495-A2 | Cancer |
| HE9OW20 | B25715 | WO200043495-A2 | Immune/Hematopoietic, Mixed Fetal, |
| | | | Neural/Sensory |
| HT4SB02 | B27560 | WO200055175-A1 | Immune/Hematopoietic |
| HCHAC68 | B27562 | WO200055175-A1 | Cancer |
| HCHCA79 | B27563 | WO200055175-A1 | Digestive, Neural/Sensory, Reproductive |
| HCHMY57 | B27564 | WO200055175-A1 | Cancer |
| HCHOY52 | B27566 | WO200055175-A1 | Cancer |
| HCHQB93 | B27567 | WO200055175-A1 | Cancer |
| HCMSA37 | B27568 | WO200055175-A1 | Cardiovascular |
| HCMSX51 | B27570 | WO200055175-A1 | Cancer |
| HCNAI74 | B27571 | WO200055175-A1 | Digestive |
| HCPAE41 | B27578 | WO200055175-A1 | Cancer |
| HCQAQ47 | B27580 | WO200055175-A1 | Cancer |
| HCQBH72 | B27581 | WO200055175-A1 | Digestive, Excretory, Immune/Hematopoietic |
| HCQDD32 | B27585 | WO200055175-A1 | Digestive, Immune/Hematopoietic, Reproductive |
| HCQDT67 | B27586 | WO200055175-A1 | Cancer |
| HCRAY10 | B27587 | WO200055175-A1 | Cancer |
| HCRBI79 | B27589 | WO200055175-A1 | Cancer |
| HNFAD50 | B27591 | WO200055175-A1 | Cancer |
| HCRNF78 | B27592 | WO200055175-A1 | Cancer |
| HCUAF85 | B27594 | WO200055175-A1 | Immune/Hematopoietic |
| HCUBM41 | B27598 | WO200055175-A1 | Immune/Hematopoietic |
| HCUBN69 | B27599 | WO200055175-A1 | Immune/Hematopoietic |
| HCUDD64 | B27602 | WO200055175-A1 | Cancer |
| HCUEC55 | B27604 | WO200055175-A1 | Immune/Hematopoietic |
| HCUFC77 | B27607 | WO200055175-A1 | Cancer |
| HBJBR40 | B27686 | WO200055201-A1 | Immune/Hematopoietic |
| HBJCH46 | B27687 | WO200055201-A1 | Immune/Hematopoietic, Musculoskeletal |
| HBJFU30 | B27698 | WO200055201-A1 | Cancer |
| HBJAY14 | B27704 | WO200055201-A1 | Immune/Hematopoietic |
| HBJND04 | B27708 | WO200055201-A1 | Cancer |
| HBKEA94 | B27711 | WO200055201-A1 | Cancer |
| HBJDS79 | B27712 | WO200055201-A1 | Cancer |
| HBKEI41 | B27713 | WO200055201-A1 | Endocrine, Mixed Fetal, Reproductive |
| HBJHO83 | B27720 | WO200055201-A1 | Immune/Hematopoietic, Reproductive |
| HBMCT40 | B27721 | WO200055201-A1 | Cancer |
| HBMTX26 | B27724 | WO200055201-A1 | Immune/Hematopoietic |
| HBMTY48 | B27725 | WO200055201-A1 | Immune/Hematopoietic, Reproductive |
| HBMUD59 | B27726 | WO200055201-A1 | Cancer |
| HBMUI10 | B27727 | WO200055201-A1 | Cancer |
| HCEEU18 | B27794 | WO200055199-A1 | Cancer |
| HCDCB03 | B27795 | WO200055199-A1 | Cancer |
| HCE1G78 | B27797 | WO200055199-A1 | Cancer |
| HCDEB19 | B27799 | WO200055199-A1 | Cancer |
| HCEDR26 | B27801 | WO200055199-A1 | Digestive, Immune/Hematopoietic, Neural/Sensory |
| HCDBW67 | B27804 | WO200055199-A1 | Cancer |
| HCDDX81 | B27808 | WO200055199-A1 | Musculoskeletal |
| HBZAI75 | B27809 | WO200055199-A1 | Digestive, Reproductive |
| HCDEN46 | B27810 | WO200055199-A1 | Cancer |
| HCE1D45 | B27811 | WO200055199-A1 | Cancer |
| HCE1Y27 | B27813 | WO200055199-A1 | Digestive, Neural/Sensory, Reproductive |
| HCE2I23 | B27816 | WO200055199-A1 | Neural/Sensory |
| HCE2P90 | B27817 | WO200055199-A1 | Neural/Sensory |
| HCE3A54 | B27818 | WO200055199-A1 | Neural/Sensory |
| HCE3D89 | B27819 | WO200055199-A1 | Endocrine, Neural/Sensory |
| HCE3N23 | B27820 | WO200055199-A1 | Cancer |
| HCE4T64 | B27821 | WO200055199-A1 | Cancer |
| HCESJ64 | B27823 | WO200055199-A1 | Digestive, Neural/Sensory |
| HCECO77 | B27824 | WO200055199-A1 | Cancer |
| HCEDH42 | B27825 | WO200055199-A1 | Neural/Sensory |
| HCEDJ05 | B27826 | WO200055199-A1 | Neural/Sensory |
| HCEEE79 | B27829 | WO200055199-A1 | Neural/Sensory |
| HCEFH31 | B27837 | WO200055199-A1 | Cancer |
| HCDDL48 | B27838 | WO200055199-A1 | Musculoskeletal |
| HFVIC33 | B27908 | WO200055171-A1 | Cancer |
| HEMAH05 | B27909 | WO200055171-A1 | Cancer |
| HHSBI65 | B27911 | WO200055171-A1 | Cancer |
| HLEAA24 | B27917 | WO200055171-A1 | Immune/Hematopoietic |
| HPTTQ91 | B27919 | WO200055171-A1 | Cancer |
| HPMGY89 | B27923 | WO200055171-A1 | Cancer |
| H2LAO03 | B27933 | WO200055171-A1 | Cancer |
| H2MBA76 | B27937 | WO200055171-A1 | Cancer |
| H2MBF60 | B27938 | WO200055171-A1 | Cancer |
| H6BSF56 | B27939 | WO200055171-A1 | Cancer |
| H6BSM88 | B27940 | WO200055171-A1 | Cancer |
| H6EEU40 | B27941 | WO200055171-A1 | Cancer |
| HACAB68 | B27943 | WO200055171-A1 | Connective/Epithelial, Immune/Hematopoietic |
| HACBA04 | B27945 | WO200055171-A1 | Cancer |
| HACBJ11 | B27946 | WO200055171-A1 | Cancer |
| HACBS86 | B27947 | WO200055171-A1 | Cancer |
| HACBT91 | B27948 | WO200055171-A1 | Cancer |
| HADAB60 | B27951 | WO200055171-A1 | Cancer |
| HADDE71 | B27956 | WO200055171-A1 | Cancer |
| HAGFU31 | B28014 | WO200055177-A2 | Neural/Sensory |
| HAPBR13 | B28017 | WO200055177-A2 | Cancer |
| HAQBG57 | B28020 | WO200055177-A2 | Cancer |
| HARAE26 | B28022 | WO200055177-A2 | Neural/Sensory |
| HAHEM51 | B28032 | WO200055177-A2 | Cardiovascular |
| HAICL90 | B28035 | WO200055177-A2 | Digestive, Immune/Hematopoietic, Reproductive |
| HAMFC67 | B28038 | WO200055177-A2 | Cancer |
| HAPBU09 | B28041 | WO200055177-A2 | Cancer |
| HAPNL62 | B28043 | WO200055177-A2 | Cancer |
| HAPNY10 | B28045 | WO200055177-A2 | Cancer |
| HAPQU71 | B28048 | WO200055177-A2 | Cancer |
| HARAT69 | B28054 | WO200055177-A2 | Cancer |
| HAGEU26 | B28059 | WO200055177-A2 | Neural/Sensory |
| HANGB24 | B28060 | WO200055177-A2 | Cancer |
| HNGER85 | B28286 | WO200058355-A1 | Immune/Hematopoietic |
| HNGET33 | B28287 | WO200058355-A1 | Immune/Hematopoietic |
| HNGFA25 | B28292 | WO200058355-A1 | Immune/Hematopoietic |
| HNGFG04 | B28297 | WO200058355-A1 | Immune/Hematopoietic |
| HNGFG74 | B28298 | WO200058355-A1 | Immune/Hematopoietic |
| HNGFI21 | B28301 | WO200058355-A1 | Cancer |
| HNGFM31 | B28302 | WO200058355-A1 | Immune/Hematopoietic |
| HCUCK44 | B28303 | WO200058355-A1 | Cancer |
| HNGFQ18 | B28304 | WO200058355-A1 | Immune/Hematopoietic |
| HNGFR54 | B28305 | WO200058355-A1 | Immune/Hematopoietic |
| HNGGF13 | B28309 | WO200058355-A1 | Immune/Hematopoietic |
| HNGGL11 | B28311 | WO200058355-A1 | Immune/Hematopoietic |
| HNGGP65 | B28312 | WO200058355-A1 | Immune/Hematopoietic |
| HNGHM47 | B28316 | WO200058355-A1 | Immune/Hematopoietic |
| HNGIH40 | B28318 | WO200058355-A1 | Immune/Hematopoietic |
| HNGIM83 | B28321 | WO200058355-A1 | Immune/Hematopoietic |
| HNGIS27 | B28322 | WO200058355-A1 | Immune/Hematopoietic |
| HADFB84 | B28707 | WO200055198-A1 | Cancer |
| HADFD01 | B28708 | WO200055198-A1 | Cancer |
| HADFK11 | B28709 | WO200055198-A1 | Connective/Epithelial |
| HADFT44 | B28710 | WO200055198-A1 | Connective/Epithelial, Mixed Fetal, Neural/Sensory |
| HADGD93 | B28714 | WO200055198-A1 | Cardiovascular, Connective/Epithelial |
| HAFBB15 | B28716 | WO200055198-A1 | Cancer |
| HAGAB62 | B28718 | WO200055198-A1 | Cancer |
| HAGAF75 | B28720 | WO200055198-A1 | Digestive, Neural/Sensory |
| HAGAZ36 | B28722 | WO200055198-A1 | Neural/Sensory |
| H2CBH91 | B28725 | WO200055198-A1 | Cancer |
| HAGBV29 | B28730 | WO200055198-A1 | Immune/Hematopoietic, Neural/Sensory |
| HAGCH67 | B28732 | WO200055198-A1 | Neural/Sensory |
| HAGCI69 | B28733 | WO200055198-A1 | Neural/Sensory, Reproductive |
| HAGCT33 | B28734 | WO200055198-A1 | Immune/Hematopoietic, Mixed Fetal, |
| | | | Neural/Sensory |
| HAGDG84 | B28737 | WO200055198-A1 | Immune/Hematopoietic, Neural/Sensory |
| HAGDO70 | B28743 | WO200055198-A1 | Cancer |
| HAGDW68 | B28746 | WO200055198-A1 | Endocrine, Neural/Sensory |
| HAGEG10 | B28748 | WO200055198-A1 | Cancer |
| HAGEK37 | B28750 | WO200055198-A1 | Cancer |
| HTADO61 | B29803 | WO200061779-A1 | Cancer |
| HELDH39 | B29805 | WO200061779-A1 | Cancer |
| HSLCV16 | B29806 | WO200061779-A1 | Cancer |
| HTOJL95 | B29807 | WO200061779-A1 | Cancer |
| HOEBK60 | B29810 | WO200061779-A1 | Cancer |
| HSAWN53 | B29813 | WO200061779-A1 | Immune/Hematopoietic |
| HORBS82 | B29814 | WO200061779-A1 | Cancer |
| HORBV76 | B29815 | WO200061779-A1 | Cardiovascular, Immune/Hematopoietic, |
| | | | Reproductive |
| HTEHA56 | B29822 | WO200061779-A1 | Cancer |
| HMWER46 | B29828 | WO200061779-A1 | Cancer |
| HPRAD30 | B29829 | WO200061779-A1 | Cancer |
| HTLDD89 | B29832 | WO200061779-A1 | Reproductive |
| HMCJC19 | B29835 | WO200061779-A1 | Immune/Hematopoietic |
| HROBW46 | B29841 | WO200061779-A1 | Digestive, Immune/Hematopoietic |
| HSOBB94 | B29842 | WO200061779-A1 | Cancer |
| HSOBP75 | B29844 | WO200061779-A1 | Cancer |
| HNHKS19 | B29848 | WO200061779-A1 | Immune/Hematopoietic, Reproductive |
| HNHKV56 | B29849 | WO200061779-A1 | Immune/Hematopoietic |
| HWLIL31 | B29850 | WO200061779-A1 | Cancer |
| HMVBC31 | B32002 | WO200058350-A1 | Cancer |
| HMVBC84 | B32003 | WO200058350-A1 | Digestive, Immune/Hematopoietic, Neural/Sensory |
| HMWAO82 | B32006 | WO200058350-A1 | Immune/Hematopoietic |
| HMWBK35 | B32008 | WO200058350-A1 | Cancer |
| HHENT16 | B32010 | WO200058350-A1 | Cancer |
| HMWEF46 | B32020 | WO200058350-A1 | Immune/Hematopoietic |
| HMWEX02 | B32022 | WO200058350-A1 | Cancer |
| HKGCK41 | B32027 | WO200058350-A1 | Cancer |
| HMWHR36 | B32029 | WO200058350-A1 | Immune/Hematopoietic |
| HMWIQ26 | B32031 | WO200058350-A1 | Cancer |
| HMWIU49 | B32032 | WO200058350-A1 | Cancer |
| HMWJJ64 | B32035 | WO200058350-A1 | Cancer |
| HNEAK38 | B32040 | WO200058350-A1 | Immune/Hematopoietic |
| HNECD52 | B32043 | WO200058350-A1 | Immune/Hematopoietic, Neural/Sensory |
| HNECL75 | B32045 | WO200058350-A1 | Cancer |
| HNECW49 | B32046 | WO200058350-A1 | Immune/Hematopoietic |
| HNEDA05 | B32048 | WO200058350-A1 | Immune/Hematopoietic |
| HETKD92 | B32371 | WO200047602-A1 | Cancer |
| HNTSN12 | B32372 | WO200047602-A1 | Cancer |
| HMQBV64 | B32373 | WO200047602-A1 | Cancer |
| HTELM16 | B32374 | WO200047602-A1 | Reproductive |
| HSDFJ26 | B32375 | WO200047602-A1 | Cancer |
| HNGND37 | B32376 | WO200047602-A1 | Cancer |
| HWBDV80 | B32377 | WO200047602-A1 | Cancer |
| HDPOR60 | B32378 | WO200047602-A1 | Cancer |
| HWBFY57 | B32379 | WO200047602-A1 | Digestive, Immune/Hematopoietic |
| HNHOL24 | B32380 | WO200047602-A1 | Immune/Hematopoietic |
| HWHIB26 | B32381 | WO200047602-A1 | Cancer |
| HHAAF20 | B32382 | WO200047602-A1 | Cancer |
| HNHNE04 | B32383 | WO200047602-A1 | Immune/Hematopoietic |
| HSAAO65 | B32384 | WO200047602-A1 | Cancer |
| HTENO07 | B32385 | WO200047602-A1 | Reproductive |
| HTLHI35 | B32386 | WO200047602-A1 | Immune/Hematopoietic, Musculoskeletal, |
| | | | Reproductive |
| HTLHY14 | B32387 | WO200047602-A1 | Immune/Hematopoietic, Neural/Sensory, |
| | | | Reproductive |
| HTXKY63 | B32388 | WO200047602-A1 | Immune/Hematopoietic |
| HOUDC53 | B32389 | WO200047602-A1 | Cancer |
| HWLGV78 | B32390 | WO200047602-A1 | Cancer |
| HCGLB30 | B32391 | WO200047602-A1 | Cancer |
| HTELP17 | B32392 | WO200047602-A1 | Cancer |
| HFXBS43 | B32393 | WO200047602-A1 | Neural/Sensory |
| HNGOM56 | B32394 | WO200047602-A1 | Immune/Hematopoietic |
| HTXON32 | B32395 | WO200047602-A1 | Immune/Hematopoietic |
| HDQHO40 | B32396 | WO200047602-A1 | Cancer |
| HKBAB11 | B32397 | WO200047602-A1 | Immune/Hematopoietic |
| HRAAN56 | B32398 | WO200047602-A1 | Excretory, Reproductive |
| HFIDS78 | B32399 | WO200047602-A1 | Connective/Epithelial, Digestive, Musculoskeletal |
| HSDIB20 | B32400 | WO200047602-A1 | Cancer |
| HHEPU04 | B32401 | WO200047602-A1 | Cancer |
| HNGKN89 | B32402 | WO200047602-A1 | Immune/Hematopoietic |
| HE9TH18 | B32403 | WO200047602-A1 | Cancer |
| HHFHM89 | B32404 | WO200047602-A1 | Cancer |
| HASAV70 | B32405 | WO200047602-A1 | Cancer |
| HSDFJ26 | B32406 | WO200047602-A1 | Cancer |
| HODAA16 | B32407 | WO200047602-A1 | Cancer |
| HODAA16 | B32408 | WO200047602-A1 | Cancer |
| HGBIB74 | B32409 | WO200047602-A1 | Cancer |
| HCRMU04 | B32410 | WO200047602-A1 | Cancer |
| HSAAO65 | B32411 | WO200047602-A1 | Cancer |
| HSAAO65 | B32412 | WO200047602-A1 | Cancer |
| HSMBB92 | B32413 | WO200047602-A1 | Cancer |
| HHEPU04 | B32414 | WO200047602-A1 | Cancer |
| HLDNA86 | B32415 | WO200047602-A1 | Cancer |
| HE9TH18 | B32416 | WO200047602-A1 | Cancer |
| HHFHM33 | B32447 | WO200047602-A1 | Cancer |
| HUUAV63 | B32481 | WO200047602-A1 | Cancer |
| HE2CJ53 | B33721 | WO200056753-A1 | Cancer |
| HE2HF76 | B33724 | WO200056753-A1 | Cancer |
| HDTDE66 | B33729 | WO200056753-A1 | Cancer |
| HDTKJ29 | B33735 | WO200056753-A1 | Cancer |
| HDTLM18 | B33736 | WO200056753-A1 | Immune/Hematopoietic |
| HE2AI94 | B33740 | WO200056753-A1 | Cancer |
| HE2BD72 | B33741 | WO200056753-A1 | Cancer |
| HE2CH58 | B33744 | WO200056753-A1 | Digestive, Mixed Fetal |
| HE2NW57 | B33753 | WO200056753-A1 | Mixed Fetal |
| HE2PJ56 | B33755 | WO200056753-A1 | Cancer |
| HE2PO93 | B33756 | WO200056753-A1 | Cancer |
| HE6AU52 | B33757 | WO200056753-A1 | Mixed Fetal |
| HAEAV42 | B33758 | WO200056753-A1 | Cancer |
| HE2AT61 | B33759 | WO200056753-A1 | Cancer |
| HE2CK47 | B33761 | WO200056753-A1 | Cancer |
| HE2DJ84 | B33763 | WO200056753-A1 | Cancer |
| HE2CJ53 | B33770 | WO200056753-A1 | Cancer |
| HSHAS72 | B33832 | WO200056753-A1 | Cancer |
| HEMDR05 | B33845 | WO200056881-A1 | Cardiovascular, Digestive, Immune/Hematopoietic |
| HADXA10 | B33846 | WO200056881-A1 | Cancer |
| HEOMF59 | B33847 | WO200056881-A1 | Immune/Hematopoietic |
| HEONP08 | B33854 | WO200056881-A1 | Immune/Hematopoietic |
| HEPAD15 | B33855 | WO200056881-A1 | Endocrine, Reproductive |
| HEIAC52 | B33860 | WO200056881-A1 | Cancer |
| HEQAP92 | B33862 | WO200056881-A1 | Cancer |
| HEQBM94 | B33865 | WO200056881-A1 | Cancer |
| HETAA62 | B33870 | WO200056881-A1 | Cancer |
| HETEY67 | B33873 | WO200056881-A1 | Connective/Epithelial, Reproductive |
| HETDP76 | B33874 | WO200056881-A1 | Cancer |
| HEQBF89 | B33875 | WO200056881-A1 | Reproductive |
| HETIN36 | B33877 | WO200056881-A1 | Cancer |
| HFAUA23 | B33881 | WO200056881-A1 | Cancer |
| HFCAG75 | B33882 | WO200056881-A1 | Cancer |
| HFCAQ17 | B33883 | WO200056881-A1 | Cancer |
| HFCDN13 | B33887 | WO200056881-A1 | Cancer |
| HFCDT67 | B33888 | WO200056881-A1 | Cancer |
| HFCEI04 | B33891 | WO200056881-A1 | Neural/Sensory |
| HTSGY89 | B33946 | WO200056881-A1 | Cancer |
| HFCAQ17 | B33947 | WO200056881-A1 | Cancer |
| HGLAH86 | B33965 | WO200056765-A1 | Immune/Hematopoietic |
| HHEBP28 | B33971 | WO200056765-A1 | Cancer |
| HHEMC55 | B33973 | WO200056765-A1 | Immune/Hematopoietic |
| HHEMM20 | B33974 | WO200056765-A1 | Immune/Hematopoietic |
| HHEMP35 | B33976 | WO200056765-A1 | Cancer |
| HHEMZ08 | B33977 | WO200056765-A1 | Cancer |
| HHENR74 | B33980 | WO200056765-A1 | Immune/Hematopoietic |
| HHEOK77 | B33983 | WO200056765-A1 | Cancer |
| HHEQI04 | B33986 | WO200056765-A1 | Connective/Epithelial, Excretory, |
| | | | Immune/Hematopoietic |
| HHFBA31 | B33987 | WO200056765-A1 | Cancer |
| HHFFF87 | B33992 | WO200056765-A1 | Cancer |
| HHFFL34 | B33993 | WO200056765-A1 | Cancer |
| HHFFS40 | B33994 | WO200056765-A1 | Cancer |
| HHGBF91 | B34005 | WO200056765-A1 | Cancer |
| HE9NB82 | B34092 | WO200056755-A1 | Cancer |
| HEAAC21 | B34095 | WO200056755-A1 | Cancer |
| HEAAM54 | B34100 | WO200056755-A1 | Reproductive |
| HEAAU28 | B34102 | WO200056755-A1 | Reproductive |
| HEBAT05 | B34104 | WO200056755-A1 | Cancer |
| HEBCN80 | B34107 | WO200056755-A1 | Neural/Sensory |
| HEBCY54 | B34108 | WO200056755-A1 | Cancer |
| HEBDW31 | B34111 | WO200056755-A1 | Cancer |
| HEBFL36 | B34112 | WO200056755-A1 | Neural/Sensory |
| HEBGE07 | B34114 | WO200056755-A1 | Neural/Sensory |
| HEBGE23 | B34115 | WO200056755-A1 | Cancer |
| HEGAI20 | B34119 | WO200056755-A1 | Reproductive |
| HEBCI18 | B34121 | WO200056755-A1 | Digestive, Immune/Hematopoietic, Neural/Sensory |
| HEBDF90 | B34125 | WO200056755-A1 | Cancer |
| HELDK79 | B34127 | WO200056755-A1 | Cardiovascular |
| HELEL76 | B34130 | WO200056755-A1 | Cancer |
| HELFO30 | B34131 | WO200056755-A1 | Cancer |
| HEMCJ80 | B34138 | WO200056755-A1 | Cancer |
| HDPAR73 | B34201 | WO200056755-A1 | Cancer |
| HDPAR73 | B34202 | WO200056755-A1 | Cancer |
| HATBI94 | B34222 | WO200055352-A2 | Cancer |
| HATCB45 | B34224 | WO200055352-A2 | Endocrine, Immune/Hematopoietic |
| HATDW05 | B34229 | WO200055352-A2 | Endocrine |
| HATEH20 | B34231 | WO200055352-A2 | Cancer |
| HAWBA65 | B34233 | WO200055352-A2 | Cancer |
| HBBBA42 | B34236 | WO200055352-A2 | Cancer |
| HBBBE83 | B34238 | WO200055352-A2 | Cancer |
| HBBMA11 | B34239 | WO200055352-A2 | Neural/Sensory |
| HBCGE46 | B34244 | WO200055352-A2 | Musculoskeletal |
| HBGML95 | B34249 | WO200055352-A2 | Reproductive |
| HBHAA05 | B34251 | WO200055352-A2 | Neural/Sensory |
| HBHAA53 | B34252 | WO200055352-A2 | Neural/Sensory |
| HBIAA59 | B34253 | WO200055352-A2 | Cancer |
| HBICW51 | B34262 | WO200055352-A2 | Digestive, Immune/Hematopoietic, Neural/Sensory |
| HFCET43 | B34299 | WO200056883-A1 | Cancer |
| HFEAG55 | B34302 | WO200056883-A1 | Cancer |
| HFEAY59 | B34304 | WO200056883-A1 | Connective/Epithelial |
| HFFAV61 | B34308 | WO200056883-A1 | Neural/Sensory |
| HFGAN63 | B34312 | WO200056883-A1 | Cancer |
| HFICH70 | B34316 | WO200056883-A1 | Musculoskeletal |
| HFIHQ57 | B34317 | WO200056883-A1 | Musculoskeletal, Reproductive |
| HFIHZ75 | B34318 | WO200056883-A1 | Cancer |
| HFIJA29 | B34321 | WO200056883-A1 | Cancer |
| HFIJD81 | B34322 | WO200056883-A1 | Cancer |
| HFIUK66 | B34324 | WO200056883-A1 | Cancer |
| HFIXC39 | B34326 | WO200056883-A1 | Cancer |
| HFIXC69 | B34327 | WO200056883-A1 | Cancer |
| HLWAU42 | B34329 | WO200056883-A1 | Cancer |
| HFIZF51 | B34331 | WO200056883-A1 | Musculoskeletal |
| HFKDX53 | B34333 | WO200056883-A1 | Cancer |
| HFKEG63 | B34335 | WO200056883-A1 | Excretory |
| HFKES05 | B34336 | WO200056883-A1 | Cancer |
| HFKES35 | B34337 | WO200056883-A1 | Cancer |
| HFKEU12 | B34338 | WO200056883-A1 | Excretory |
| HFOYR54 | B34344 | WO200056883-A1 | Cancer |
| HFPBJ64 | B34347 | WO200056883-A1 | Musculoskeletal, Neural/Sensory |
| HFXBV67 | B34441 | WO200056767-A1 | Digestive, Neural/Sensory |
| HFXBY20 | B34442 | WO200056767-A1 | Neural/Sensory |
| HFXGT51 | B34462 | WO200056767-A1 | Neural/Sensory |
| HFXGW04 | B34463 | WO200056767-A1 | Cancer |
| HFXHL83 | B34466 | WO200056767-A1 | Neural/Sensory |
| HFXJB21 | B34468 | WO200056767-A1 | Neural/Sensory |
| HFXJN93 | B34469 | WO200056767-A1 | Neural/Sensory |
| HFXJT53 | B34470 | WO200056767-A1 | Cancer |
| HFXLK91 | B34472 | WO200056767-A1 | Cancer |
| HFXHM49 | B34473 | WO200056767-A1 | Neural/Sensory |
| HGBDV35 | B34474 | WO200056767-A1 | Cancer |
| HEPCU48 | B34476 | WO200056767-A1 | Cancer |
| HGBGN34 | B34478 | WO200056767-A1 | Connective/Epithelial, Digestive, Reproductive |
| HGBGX31 | B34479 | WO200056767-A1 | Cancer |
| HGBHP91 | B34482 | WO200056767-A1 | Digestive |
| HCEFN51 | B34580 | WO200056751-A1 | Cancer |
| HCEFZ82 | B34581 | WO200056751-A1 | Cancer |
| HCEJL08 | B34585 | WO200056751-A1 | Cancer |
| HCENN67 | B34588 | WO200056751-A1 | Digestive, Endocrine, Neural/Sensory |
| HCEPC90 | B34592 | WO200056751-A1 | Neural/Sensory |
| HCETL19 | B34597 | WO200056751-A1 | Immune/Hematopoietic, Neural/Sensory, |
| | | | Reproductive |
| HCFAT42 | B34602 | WO200056751-A1 | Immune/Hematopoietic |
| HCFAT66 | B34603 | WO200056751-A1 | Immune/Hematopoietic |
| HCFBM77 | B34605 | WO200056751-A1 | Immune/Hematopoietic |
| HCFLJ52 | B34611 | WO200056751-A1 | Cancer |
| HCFLP48 | B34613 | WO200056751-A1 | Immune/Hematopoietic |
| HCFLQ12 | B34614 | WO200056751-A1 | Cancer |
| HCFMA39 | B34617 | WO200056751-A1 | Immune/Hematopoietic |
| HCFML07 | B34619 | WO200056751-A1 | Cancer |
| HCFMX88 | B34620 | WO200056751-A1 | Immune/Hematopoietic, Neural/Sensory |
| HCFNN16 | B34623 | WO200056751-A1 | Cancer |
| HCFNN75 | B34624 | WO200056751-A1 | Cancer |
| HLYBI48 | B34774 | WO200058356-A1 | Immune/Hematopoietic |
| HFKES35 | B34777 | WO200058356-A1 | Cancer |
| HLYBU15 | B34781 | WO200058356-A1 | Immune/Hematopoietic |
| HLYDX01 | B34789 | WO200058356-A1 | Cancer |
| HLYEA60 | B34790 | WO200058356-A1 | Cancer |
| HLYEU59 | B34793 | WO200058356-A1 | Immune/Hematopoietic |
| HLYGE16 | B34794 | WO200058356-A1 | Cancer |
| HLYGV19 | B34795 | WO200058356-A1 | Cancer |
| HLYGY91 | B34796 | WO200058356-A1 | Cancer |
| HMADJ14 | B34797 | WO200058356-A1 | Connective/Epithelial, Immune/Hematopoietic, |
| | | | Musculoskeletal |
| HMAGF01 | B34798 | WO200058356-A1 | Cancer |
| HMDAB44 | B34806 | WO200058356-A1 | Neural/Sensory |
| HMDAE88 | B34808 | WO200058356-A1 | Neural/Sensory |
| HMDAG62 | B34809 | WO200058356-A1 | Cancer |
| HMDAK20 | B34810 | WO200058356-A1 | Neural/Sensory |
| HMECM77 | B34815 | WO200058356-A1 | Cardiovascular |
| HMECQ59 | B34816 | WO200058356-A1 | Cancer |
| HMEEZ07 | B34821 | WO200058356-A1 | Cardiovascular, Reproductive |
| HDPCV29 | B34856 | WO200056766-A1 | Immune/Hematopoietic |
| HDPCW16 | B34857 | WO200056766-A1 | Cancer |
| HDPFG13 | B34859 | WO200056766-A1 | Cancer |
| HDPFU43 | B34860 | WO200056766-A1 | Cancer |
| HDPFZ05 | B34861 | WO200056766-A1 | Immune/Hematopoietic, Neural/Sensory |
| HDPGA84 | B34862 | WO200056766-A1 | Cancer |
| HDPIH25 | B34864 | WO200056766-A1 | Cancer |
| HDPKC55 | B34866 | WO200056766-A1 | Cardiovascular, Immune/Hematopoietic, |
| | | | Reproductive |
| HDPNC21 | B34868 | WO200056766-A1 | Cancer |
| HDPOL37 | B34869 | WO200056766-A1 | Immune/Hematopoietic, Reproductive |
| HDPSZ07 | B34871 | WO200056766-A1 | Immune/Hematopoietic |
| HDPXN20 | B34872 | WO200056766-A1 | Immune/Hematopoietic |
| HDQGN08 | B34874 | WO200056766-A1 | Immune/Hematopoietic |
| HDPGE24 | B34877 | WO200056766-A1 | Cancer |
| HDPJV53 | B34878 | WO200056766-A1 | Immune/Hematopoietic |
| HDPOC24 | B34881 | WO200056766-A1 | Cancer |
| HDPPC19 | B34883 | WO200056766-A1 | Immune/Hematopoietic |
| HBCAO31 | B34886 | WO200056766-A1 | Cancer |
| HDQGD06 | B34889 | WO200056766-A1 | Cancer |
| HDRAA17 | B34890 | WO200056766-A1 | Cancer |
| HDRAC68 | B34891 | WO200056766-A1 | Cancer |
| HDSAH37 | B34893 | WO200056766-A1 | Connective/Epithelial |
| HDSAP15 | B34896 | WO200056766-A1 | Cancer |
| HDTAS57 | B34897 | WO200056766-A1 | Cancer |
| HDPFU43 | B34916 | WO200056766-A1 | Cancer |
| HDPKC55 | B34932 | WO200056766-A1 | Cardiovascular, Immune/Hematopoietic, |
| | | | Reproductive |
| HPRCB54 | B36696 | WO200071150-A1 | Cancer |
| HMQAT69 | B37348 | WO200058335-A1 | Cancer |
| HMQBL90 | B37349 | WO200058335-A1 | Digestive, Immune/Hematopoietic |
| HMQCX41 | B37354 | WO200058335-A1 | Immune/Hematopoietic |
| HMQDU07 | B37356 | WO200058335-A1 | Digestive, Immune/Hematopoietic, |
| | | | Musculoskeletal |
| HMSDI67 | B37365 | WO200058335-A1 | Digestive, Immune/Hematopoietic |
| HMSHC86 | B37372 | WO200058335-A1 | Immune/Hematopoietic |
| HMSII36 | B37376 | WO200058335-A1 | Immune/Hematopoietic |
| HMSIT42 | B37377 | WO200058335-A1 | Digestive, Immune/Hematopoietic, Neural/Sensory |
| HMSKQ91 | B37381 | WO200058335-A1 | Immune/Hematopoietic |
| HMTAT36 | B37384 | WO200058335-A1 | Cancer |
| HMUBK53 | B37390 | WO200058335-A1 | Cancer |
| HMUBO15 | B37392 | WO200058335-A1 | Cancer |
| HMUBZ15 | B37393 | WO200058335-A1 | Cancer |
| HMSLF15 | B37984 | WO200055371-A1 | Cancer |
| HKAET41 | B37985 | WO200055371-A1 | Connective/Epithelial, Digestive, Reproductive |
| HE9RJ42 | B37987 | WO200055371-A1 | Mixed Fetal |
| HDPAS92 | B37988 | WO200055371-A1 | Cancer |
| HATDF29 | B37989 | WO200055371-A1 | Cancer |
| HWLHH15 | B37990 | WO200055371-A1 | Digestive |
| HBXFL29 | B37991 | WO200055371-A1 | Cancer |
| HKGBF67 | B37992 | WO200055371-A1 | Cancer |
| HWHGP71 | B37993 | WO200055371-A1 | Connective/Epithelial, Immune/Hematopoietic, |
| | | | Reproductive |
| HLWCU38 | B37994 | WO200055371-A1 | Cancer |
| HMTAX46 | B37995 | WO200055371-A1 | Cancer |
| HIBEU15 | B37996 | WO200055371-A1 | Excretory, Immune/Hematopoietic, Neural/Sensory |
| HDPQV66 | B37997 | WO200055371-A1 | Cancer |
| HFXGW52 | B37998 | WO200055371-A1 | Neural/Sensory |
| HHEQR55 | B37999 | WO200055371-A1 | Immune/Hematopoietic |
| HNHNW84 | B38000 | WO200055371-A1 | Immune/Hematopoietic |
| HAJBX74 | B38001 | WO200055371-A1 | Cancer |
| HCUGE72 | B38002 | WO200055371-A1 | Cancer |
| HTEQI22 | B38003 | WO200055371-A1 | Cancer |
| HDPYE41 | B38004 | WO200055371-A1 | Immune/Hematopoietic |
| HDTII23 | B38005 | WO200055371-A1 | Immune/Hematopoietic |
| HAMFL84 | B38007 | WO200055371-A1 | Cancer |
| HTELW37 | B38008 | WO200055371-A1 | Reproductive |
| HNGOU56 | B38009 | WO200055371-A1 | Immune/Hematopoietic |
| HOUHD63 | B38010 | WO200055371-A1 | Cancer |
| HPJCX13 | B38011 | WO200055371-A1 | Cancer |
| HNHCT15 | B38012 | WO200055371-A1 | Cancer |
| HKGBF67 | B38013 | WO200055371-A1 | Cancer |
| HWHGP71 | B38014 | WO200055371-A1 | Connective/Epithelial, Immune/Hematopoietic, |
| | | | Reproductive |
| HTEQI22 | B38016 | WO200055371-A1 | Cancer |
| HJBCI01 | B38017 | WO200055371-A1 | Cancer |
| HTSFV18 | B38018 | WO200055371-A1 | Cancer |
| HPJBF63 | B38019 | WO200055371-A1 | Cancer |
| HWHGP71 | B38044 | WO200055371-A1 | Connective/Epithelial, Immune/Hematopoietic, |
| | | | Reproductive |
| HNEDU46 | B38119 | WO200058468-A2 | Cancer |
| HNFDY31 | B38124 | WO200058468-A2 | Cancer |
| HNFEA17 | B38125 | WO200058468-A2 | Cancer |
| HNFET12 | B38127 | WO200058468-A2 | Immune/Hematopoietic |
| HNFGR08 | B38129 | WO200058468-A2 | Immune/Hematopoietic |
| HNFGW37 | B38130 | WO200058468-A2 | Immune/Hematopoietic |
| HNFGW53 | B38131 | WO200058468-A2 | Cancer |
| HNFHA34 | B38132 | WO200058468-A2 | Cancer |
| HNFJE27 | B38137 | WO200058468-A2 | Immune/Hematopoietic |
| HNGAM58 | B38143 | WO200058468-A2 | Immune/Hematopoietic |
| HNGAT83 | B38144 | WO200058468-A2 | Immune/Hematopoietic |
| HNGBE63 | B38148 | WO200058468-A2 | Immune/Hematopoietic |
| HNGBH53 | B38149 | WO200058468-A2 | Immune/Hematopoietic |
| HNGBJ74 | B38150 | WO200058468-A2 | Immune/Hematopoietic |
| HNGBQ61 | B38152 | WO200058468-A2 | Immune/Hematopoietic |
| HNGBW25 | B38154 | WO200058468-A2 | Immune/Hematopoietic |
| HNGCF64 | B38156 | WO200058468-A2 | Immune/Hematopoietic |
| HNGDH22 | B38158 | WO200058468-A2 | Immune/Hematopoietic |
| HNGDQ38 | B38161 | WO200058468-A2 | Immune/Hematopoietic |
| HNGDR39 | B38162 | WO200058468-A2 | Immune/Hematopoietic |
| HNGEA34 | B38165 | WO200058468-A2 | Digestive, Immune/Hematopoietic |
| HTOJB02 | B38205 | WO200058469-A1 | Immune/Hematopoietic |
| HSDEA26 | B38207 | WO200058469-A1 | Neural/Sensory |
| HATCF80 | B38209 | WO200058469-A1 | Cancer |
| HTOAK03 | B38215 | WO200058469-A1 | Cancer |
| HSLAB11 | B38216 | WO200058469-A1 | Cancer |
| HSJAU93 | B38218 | WO200058469-A1 | Cancer |
| HSHBT15 | B38221 | WO200058469-A1 | Cancer |
| HSLCS31 | B38234 | WO200058469-A1 | Cancer |
| HSLCS34 | B38235 | WO200058469-A1 | Cancer |
| HOBNF51 | B38237 | WO200058469-A1 | Cancer |
| HSFAM19 | B38242 | WO200058469-A1 | Cancer |
| HNHEY29 | B38245 | WO200058469-A1 | Immune/Hematopoietic |
| HTHDB20 | B38248 | WO200058469-A1 | Immune/Hematopoietic |
| HPMGM06 | B38250 | WO200058469-A1 | Digestive, Neural/Sensory, Reproductive |
| HDPMA04 | B38321 | WO200061623-A1 | Immune/Hematopoietic |
| HEMFQ46 | B38322 | WO200061623-A1 | Cancer |
| HKAJK47 | B38324 | WO200061623-A1 | Cancer |
| HCGMF16 | B38325 | WO200061623-A1 | Cancer |
| HMSGU01 | B38326 | WO200061623-A1 | Cancer |
| HNTCE26 | B38327 | WO200061623-A1 | Cancer |
| HPTTI70 | B38328 | WO200061623-A1 | Cancer |
| HNSAD53 | B38329 | WO200061623-A1 | Digestive |
| HTEBV72 | B38330 | WO200061623-A1 | Reproductive |
| HCE3Z61 | B38331 | WO200061623-A1 | Cancer |
| HSSGD52 | B38332 | WO200061623-A1 | Cancer |
| HAPSA79 | B38333 | WO200061623-A1 | Cancer |
| HASAU84 | B38334 | WO200061623-A1 | Cancer |
| HLWEA51 | B38335 | WO200061623-A1 | Cancer |
| HNFIZ34 | B38336 | WO200061623-A1 | Cancer |
| HTELS08 | B38337 | WO200061623-A1 | Reproductive |
| HTLEJ24 | B38338 | WO200061623-A1 | Cancer |
| HCEHF62 | B38339 | WO200061623-A1 | Cancer |
| HUFBY15 | B38340 | WO200061623-A1 | Digestive, Musculoskeletal, Reproductive |
| HELHD85 | B38341 | WO200061623-A1 | Cancer |
| HOFNY91 | B38342 | WO200061623-A1 | Cancer |
| HEGAK44 | B38343 | WO200061623-A1 | Cancer |
| HETBA14 | B38344 | WO200061623-A1 | Cancer |
| HBAFV19 | B38345 | WO200061623-A1 | Cancer |
| HTXDO17 | B38346 | WO200061623-A1 | Immune/Hematopoietic, Neural/Sensory, |
| | | | Respiratory |
| HE8DS15 | B38347 | WO200061623-A1 | Cancer |
| HLDOW79 | B38348 | WO200061623-A1 | Cardiovascular, Digestive |
| HOFND85 | B38349 | WO200061623-A1 | Cancer |
| HBIBU30 | B38350 | WO200061623-A1 | Cancer |
| HODFG71 | B38351 | WO200061623-A1 | Reproductive |
| HNHGE28 | B38352 | WO200061623-A1 | Cancer |
| HYASD09 | B38355 | WO200061623-A1 | Cancer |
| HDPCL63 | B38356 | WO200061623-A1 | Cancer |
| HBDAD07 | B38357 | WO200061623-A1 | Immune/Hematopoietic |
| HTOHG09 | B38361 | WO200061623-A1 | Cancer |
| HWBFX31 | B38362 | WO200061623-A1 | Cancer |
| HLHDP16 | B38363 | WO200061623-A1 | Cancer |
| HSDBC88 | B38364 | WO200061623-A1 | Cancer |
| HOVBX78 | B38365 | WO200061623-A1 | Cancer |
| HWADJ89 | B38367 | WO200061623-A1 | Immune/Hematopoietic |
| HYABE50 | B38368 | WO200061623-A1 | Cancer |
| HSJAQ17 | B38369 | WO200061623-A1 | Cancer |
| HCUGM86 | B38370 | WO200061623-A1 | Immune/Hematopoietic |
| HLDQC46 | B38371 | WO200061623-A1 | Cancer |
| HOFOA59 | B38372 | WO200061623-A1 | Reproductive |
| HFABG18 | B38373 | WO200061623-A1 | Cancer |
| HNHLY33 | B38374 | WO200061623-A1 | Immune/Hematopoietic |
| HFCFJ18 | B38375 | WO200061623-A1 | Cancer |
| HANGG89 | B38376 | WO200061623-A1 | Cancer |
| HNHOD46 | B38377 | WO200061623-A1 | Immune/Hematopoietic |
| HLYBI58 | B38379 | WO200061623-A1 | Cancer |
| HAJBG14 | B38381 | WO200061623-A1 | Cancer |
| HE9NN84 | B38382 | WO200061623-A1 | Cancer |
| HAPSA79 | B38383 | WO200061623-A1 | Cancer |
| HAPSA79 | B38384 | WO200061623-A1 | Cancer |
| HTLEJ24 | B38385 | WO200061623-A1 | Cancer |
| HEGAK44 | B38386 | WO200061623-A1 | Cancer |
| HTXDO17 | B38387 | WO200061623-A1 | Immune/Hematopoietic, Neural/Sensory, |
| | | | Respiratory |
| HBIBB20 | B38388 | WO200061623-A1 | Cancer |
| HSIDL71 | B38389 | WO200061623-A1 | Cancer |
| HOVBX78 | B38390 | WO200061623-A1 | Cancer |
| HYABE50 | B38391 | WO200061623-A1 | Cancer |
| HFCFJ18 | B38392 | WO200061623-A1 | Cancer |
| HPRAL78 | B38394 | WO200061623-A1 | Cancer |
| HCE5F84 | B38395 | WO200061623-A1 | Cancer |
| HAMHE82 | B38396 | WO200061623-A1 | Cancer |
| HACBZ59 | B38472 | WO200061623-A1 | Cancer |
| HACBZ59 | B38475 | WO200061623-A1 | Cancer |
| HWLQU40 | B38514 | WO200061623-A1 | Cancer |
| HFKFI35 | B38527 | WO200056882-A1 | Excretory |
| HFPCZ55 | B38529 | WO200056882-A1 | Cancer |
| HFPDR39 | B38533 | WO200056882-A1 | Cancer |
| HFPDX08 | B38536 | WO200056882-A1 | Cancer |
| HFRAB10 | B38539 | WO200056882-A1 | Excretory, Immune/Hematopoietic, Neural/Sensory |
| HFSBE94 | B38541 | WO200056882-A1 | Immune/Hematopoietic |
| HFTAR30 | B38545 | WO200056882-A1 | Cancer |
| HFTBB50 | B38546 | WO200056882-A1 | Cancer |
| HFSAY91 | B38551 | WO200056882-A1 | Cancer |
| HFSBC10 | B38552 | WO200056882-A1 | Immune/Hematopoietic, Mixed Fetal |
| HFTDK11 | B38555 | WO200056882-A1 | Cancer |
| HFVHW43 | B38560 | WO200056882-A1 | Digestive |
| HFXBI64 | B38567 | WO200056882-A1 | Neural/Sensory |
| HFXBL05 | B38568 | WO200056882-A1 | Mixed Fetal, Neural/Sensory |
| HHGBV02 | B38971 | WO200056880-A1 | Immune/Hematopoietic, Reproductive |
| HHGBW55 | B38972 | WO200056880-A1 | Immune/Hematopoietic, Reproductive |
| HHGDI12 | B38976 | WO200056880-A1 | Neural/Sensory |
| HHPBG90 | B38983 | WO200056880-A1 | Cancer |
| HHPFP26 | B38987 | WO200056880-A1 | Cancer |
| HHPGU74 | B38990 | WO200056880-A1 | Neural/Sensory |
| HHPEB61 | B38991 | WO200056880-A1 | Cancer |
| HHSBJ92 | B39002 | WO200056880-A1 | Cancer |
| HHPSE03 | B39004 | WO200056880-A1 | Neural/Sensory |
| HHSCQ67 | B39005 | WO200056880-A1 | Cancer |
| HHSDB43 | B39007 | WO200056880-A1 | Cancer |
| HHTLH79 | B39015 | WO200056880-A1 | Immune/Hematopoietic, Musculoskeletal, |
| | | | Neural/Sensory |
| HIABC70 | B39016 | WO200056880-A1 | Cancer |
| HIBCR82 | B39017 | WO200056880-A1 | Mixed Fetal, Neural/Sensory |
| HIBEC45 | B39019 | WO200056880-A1 | Cancer |
| HILCA24 | B39020 | WO200056880-A1 | Digestive, Immune/Hematopoietic, Reproductive |
| HLHBS54 | B39093 | WO200058513-A1 | Cancer |
| HLMCT95 | B39098 | WO200058513-A1 | Cancer |
| HLDRU08 | B39100 | WO200058513-A1 | Cancer |
| HLDXF43 | B39101 | WO200058513-A1 | Cancer |
| HLEAA10 | B39102 | WO200058513-A1 | Immune/Hematopoietic |
| HLHCB33 | B39104 | WO200058513-A1 | Digestive, Reproductive, Respiratory |
| HLHCF14 | B39105 | WO200058513-A1 | Connective/Epithelial, Respiratory |
| HLHCN51 | B39107 | WO200058513-A1 | Digestive, Immune/Hematopoietic, Respiratory |
| HLHDM38 | B39109 | WO200058513-A1 | Cancer |
| HLHEX62 | B39111 | WO200058513-A1 | Excretory, Immune/Hematopoietic, Respiratory |
| HLHSG15 | B39114 | WO200058513-A1 | Cancer |
| HLIBD74 | B39117 | WO200058513-A1 | Digestive |
| HLICO10 | B39120 | WO200058513-A1 | Cancer |
| HLJBI22 | B39121 | WO200058513-A1 | Cancer |
| HLLAX95 | B39123 | WO200058513-A1 | Immune/Hematopoietic |
| HLMBZ14 | B39127 | WO200058513-A1 | Immune/Hematopoietic |
| HLMDH01 | B39129 | WO200058513-A1 | Immune/Hematopoietic |
| HLMDU23 | B39130 | WO200058513-A1 | Immune/Hematopoietic |
| HLMFU53 | B39133 | WO200058513-A1 | Cancer |
| HLMHG68 | B39135 | WO200058513-A1 | Cancer |
| HLMIM84 | B39137 | WO200058513-A1 | Cancer |
| HLMIQ83 | B39139 | WO200058513-A1 | Immune/Hematopoietic |
| HLDRT09 | B39140 | WO200058513-A1 | Cancer |
| HE9EA10 | B39181 | WO200056754-A1 | Cancer |
| HE6CS65 | B39182 | WO200056754-A1 | Cancer |
| HE8BE20 | B39190 | WO200056754-A1 | Cancer |
| HE8BT58 | B39193 | WO200056754-A1 | Cancer |
| HE8CA13 | B39195 | WO200056754-A1 | Cancer |
| HE8FC10 | B39201 | WO200056754-A1 | Immune/Hematopoietic, Mixed Fetal, Reproductive |
| HE8FG24 | B39202 | WO200056754-A1 | Cancer |
| HE8FL24 | B39203 | WO200056754-A1 | Mixed Fetal |
| HE8MA27 | B39204 | WO200056754-A1 | Cancer |
| HE8MG56 | B39205 | WO200056754-A1 | Mixed Fetal |
| HE8QU21 | B39208 | WO200056754-A1 | Immune/Hematopoietic, Mixed Fetal |
| HE8UX34 | B39210 | WO200056754-A1 | Mixed Fetal |
| HE9CY05 | B39216 | WO200056754-A1 | Mixed Fetal |
| HE9DG54 | B39217 | WO200056754-A1 | Cancer |
| HE9DZ47 | B39218 | WO200056754-A1 | Endocrine, Immune/Hematopoietic, Mixed Fetal |
| HE8EX86 | B39226 | WO200056754-A1 | Cancer |
| HMEIH57 | B39310 | WO200057903-A2 | Cardiovascular, Immune/Hematopoietic |
| HFEBA88 | B39312 | WO200057903-A2 | Cancer |
| HMEKW44 | B39317 | WO200057903-A2 | Cardiovascular, Immune/Hematopoietic, |
| | | | Neural/Sensory |
| HMELM75 | B39318 | WO200057903-A2 | Cancer |
| HMIAC52 | B39322 | WO200057903-A2 | Cancer |
| HMIAL39 | B39325 | WO200057903-A2 | Cancer |
| HMIBD93 | B39329 | WO200057903-A2 | Cancer |
| HMIBE95 | B39330 | WO200057903-A2 | Neural/Sensory |
| HMMAL32 | B39344 | WO200057903-A2 | Immune/Hematopoietic |
| HMMBK55 | B39348 | WO200057903-A2 | Immune/Hematopoietic |
| HMMBR63 | B39350 | WO200057903-A2 | Cancer |
| HMMBS55 | B39351 | WO200057903-A2 | Immune/Hematopoietic, Reproductive |
| HMMBT47 | B39352 | WO200057903-A2 | Immune/Hematopoietic |
| HMMCD35 | B39353 | WO200057903-A2 | Immune/Hematopoietic |
| HFKCZ13 | B39362 | WO200057903-A2 | Cancer |
| HFKCZ13 | B39363 | WO200057903-A2 | Cancer |
| HOAAL10 | B39402 | WO200058340-A2 | Musculoskeletal |
| HTXCV44 | B39406 | WO200058340-A2 | Immune/Hematopoietic, Neural/Sensory |
| HTXDJ75 | B39407 | WO200058340-A2 | Digestive, Immune/Hematopoietic, Mixed Fetal |
| HSIDZ25 | B39410 | WO200058340-A2 | Cancer |
| HTXEN33 | B39413 | WO200058340-A2 | Immune/Hematopoietic, Reproductive |
| HJPDK61 | B39419 | WO200058340-A2 | Cancer |
| HNHBM16 | B39420 | WO200058340-A2 | Immune/Hematopoietic, Neural/Sensory |
| HNHDE58 | B39422 | WO200058340-A2 | Cancer |
| HTTDT67 | B39425 | WO200058340-A2 | Cancer |
| HTLEP55 | B39427 | WO200058340-A2 | Cancer |
| HCUBA28 | B39430 | WO200058340-A2 | Cancer |
| HSNAT08 | B39433 | WO200058340-A2 | Cancer |
| HTOEV01 | B39437 | WO200058340-A2 | Immune/Hematopoietic, Reproductive |
| HSQBF66 | B39439 | WO200058340-A2 | Cancer |
| HSJBY32 | B39445 | WO200058340-A2 | Immune/Hematopoietic, Musculoskeletal, |
| | | | Neural/Sensory |
| HPMCV30 | B39447 | WO200058340-A2 | Cancer |
| HPMDF45 | B39448 | WO200058340-A2 | Excretory, Immune/Hematopoietic, Reproductive |
| HPIBI40 | B40153 | WO200058496-A1 | Cancer |
| HRDBA20 | B40154 | WO200058496-A1 | Musculoskeletal |
| HTJMA64 | B40156 | WO200058496-A1 | Cancer |
| HTHDF86 | B40157 | WO200058496-A1 | Immune/Hematopoietic |
| HRDBA20 | B40158 | WO200058496-A1 | Musculoskeletal |
| HSAAN03 | B40161 | WO200058496-A1 | Cancer |
| HRABZ80 | B40162 | WO200058496-A1 | Excretory, Immune/Hematopoietic, |
| | | | Musculoskeletal |
| HPDDQ28 | B40163 | WO200058496-A1 | Endocrine, Musculoskeletal |
| HOSBX14 | B40166 | WO200058496-A1 | Immune/Hematopoietic, Musculoskeletal, |
| | | | Reproductive |
| HCRAI29 | B40168 | WO200058496-A1 | Neural/Sensory |
| HSAXI10 | B40171 | WO200058496-A1 | Digestive, Immune/Hematopoietic |
| HTSFV18 | B40172 | WO200058496-A1 | Cancer |
| HNHGK22 | B40174 | WO200058496-A1 | Immune/Hematopoietic |
| HPMFP48 | B40176 | WO200058496-A1 | Cancer |
| HUSGL67 | B40177 | WO200058496-A1 | Cancer |
| HOFMO16 | B40180 | WO200058496-A1 | Reproductive |
| HPMAI31 | B40182 | WO200058496-A1 | Cancer |
| HTTAP37 | B40184 | WO200058496-A1 | Immune/Hematopoietic, Reproductive |
| HSABA15 | B40187 | WO200058496-A1 | Cancer |
| HPEAA65 | B40188 | WO200058496-A1 | Digestive, Immune/Hematopoietic, Reproductive |
| HSSAN03 | B40189 | WO200058496-A1 | Cancer |
| HTTDG27 | B40194 | WO200058496-A1 | Reproductive |
| HTPDV75 | B40195 | WO200058496-A1 | Digestive, Reproductive |
| HMJAC12 | B40197 | WO200058496-A1 | Neural/Sensory |
| HTLEJ24 | B40198 | WO200058496-A1 | Cancer |
| HBAMC47 | B43415 | WO200055350-A1 | Excretory |
| HBGDH11 | B43571 | WO200055350-A1 | Cancer |
| HCHAK72 | B43572 | WO200055350-A1 | Cancer |
| HSRAB84 | B43594 | WO200055350-A1 | Cancer |
| HMWBH91 | B43612 | WO200055350-A1 | Cancer |
| HUFFG07 | B43619 | WO200055350-A1 | Cancer |
| HMEIY69 | B43625 | WO200055350-A1 | Cancer |
| HIBCN93 | B43651 | WO200055350-A1 | Cancer |
| HDPQE64 | B43656 | WO200055350-A1 | Cancer |
| HSYCY88 | B43723 | WO200055350-A1 | Cancer |
| HCMSD61 | B43779 | WO200055350-A1 | Cancer |
| H2CBK94 | B43801 | WO200055350-A1 | Digestive, Neural/Sensory, Respiratory |
| HE9NK60 | B43812 | WO200055350-A1 | Cancer |
| HTXDT74 | B43844 | WO200055350-A1 | Cancer |
| HTTKN45 | B43848 | WO200055350-A1 | Cancer |
| HSSGC06 | B43861 | WO200055350-A1 | Cancer |
| HE8AM92 | B43893 | WO200055350-A1 | Cancer |
| HWLHZ28 | B43933 | WO200055350-A1 | Cancer |
| HCEDM42 | B43935 | WO200055350-A1 | Cancer |
| HMWFM73 | B43952 | WO200055350-A1 | Cancer |
| HCHBQ27 | B44028 | WO200055350-A1 | Reproductive |
| HCHBQ27 | B44029 | WO200055350-A1 | Reproductive |
| HCEGS49 | B44338 | WO200058358-A1 | Connective/Epithelial, Neural/Sensory, |
| | | | Reproductive |
| HTODH57 | B44349 | WO200058358-A1 | Immune/Hematopoietic |
| HRTAR24 | B44351 | WO200058358-A1 | Digestive, Immune/Hematopoietic |
| HSLAW59 | B44355 | WO200058358-A1 | Immune/Hematopoietic, Musculoskeletal |
| HODAG07 | B44358 | WO200058358-A1 | Reproductive |
| HODBA45 | B44360 | WO200058358-A1 | Reproductive |
| HODBD79 | B44361 | WO200058358-A1 | Immune/Hematopoietic, Reproductive |
| HODDG72 | B44363 | WO200058358-A1 | Cancer |
| HSVAE42 | B44367 | WO200058358-A1 | Connective/Epithelial, Neural/Sensory |
| HNHAG83 | B44369 | WO200058358-A1 | Immune/Hematopoietic, Mixed Fetal, |
| | | | Musculoskeletal |
| HSIDA39 | B44374 | WO200058358-A1 | Digestive |
| HYBAW56 | B44375 | WO200058358-A1 | Musculoskeletal |
| HSATI91 | B44376 | WO200058358-A1 | Immune/Hematopoietic |
| HPWAO89 | B44379 | WO200058358-A1 | Immune/Hematopoietic, Reproductive |
| HOUCD12 | B44380 | WO200058358-A1 | Connective/Epithelial |
| HWTAM38 | B44381 | WO200058358-A1 | Digestive, Immune/Hematopoietic, Reproductive |
| HKGCE62 | B44597 | WO200058339-A2 | Immune/Hematopoietic |
| HKGAK45 | B44601 | WO200058339-A2 | Musculoskeletal, Reproductive |
| HKGBC33 | B44602 | WO200058339-A2 | Immune/Hematopoietic |
| HKGBH54 | B44606 | WO200058339-A2 | Cancer |
| HKGCK41 | B44608 | WO200058339-A2 | Cancer |
| HKGCX05 | B44610 | WO200058339-A2 | Cancer |
| HKGDA95 | B44611 | WO200058339-A2 | Cancer |
| HKIME53 | B44612 | WO200058339-A2 | Cancer |
| HKIXR91 | B44616 | WO200058339-A2 | Cancer |
| HKMLT89 | B44625 | WO200058339-A2 | Excretory, Immune/Hematopoietic, Reproductive |
| HKMMU76 | B44629 | WO200058339-A2 | Cancer |
| HL3AE69 | B44635 | WO200058339-A2 | Cancer |
| HLDBV54 | B44638 | WO200058339-A2 | Cancer |
| HLDNF18 | B44639 | WO200058339-A2 | Cancer |
| HLDOL74 | B44642 | WO200058339-A2 | Cancer |
| HKIMG23 | B44643 | WO200058339-A2 | Cancer |
| HLDBV18 | B44645 | WO200058339-A2 | Cancer |
| HMQBU44 | B44647 | WO200058339-A2 | Cancer |
| HNHDM21 | B44703 | WO200058494-A1 | Immune/Hematopoietic |
| HNHDM43 | B44704 | WO200058494-A1 | Immune/Hematopoietic |
| HNHDX28 | B44708 | WO200058494-A1 | Immune/Hematopoietic |
| HNHEG30 | B44713 | WO200058494-A1 | Immune/Hematopoietic |
| HNHEL22 | B44715 | WO200058494-A1 | Immune/Hematopoietic |
| HNHFF60 | B44720 | WO200058494-A1 | Immune/Hematopoietic |
| HTHDH18 | B44723 | WO200058494-A1 | Immune/Hematopoietic |
| HTHDP65 | B44724 | WO200058494-A1 | Cancer |
| HTHDT25 | B44725 | WO200058494-A1 | Immune/Hematopoietic |
| HTGAQ29 | B44727 | WO200058494-A1 | Immune/Hematopoietic |
| HTGAS70 | B44728 | WO200058494-A1 | Cancer |
| HNHGD95 | B44731 | WO200058494-A1 | Cardiovascular, Immune/Hematopoietic |
| HNHGR82 | B44733 | WO200058494-A1 | Immune/Hematopoietic |
| HSAYL24 | B44763 | WO200058336-A1 | Immune/Hematopoietic |
| HTGDS92 | B44764 | WO200058336-A1 | Cancer |
| HTWDJ17 | B44767 | WO200058336-A1 | Cancer |
| HNGJL07 | B44776 | WO200058336-A1 | Immune/Hematopoietic, Neural/Sensory |
| HSSGS62 | B44785 | WO200058336-A1 | Musculoskeletal, Reproductive |
| HOVCC73 | B44786 | WO200058336-A1 | Immune/Hematopoietic, Reproductive |
| HSAYO82 | B44788 | WO200058336-A1 | Endocrine, Immune/Hematopoietic |
| HMACT74 | B44791 | WO200058336-A1 | Immune/Hematopoietic |
| HMIAD75 | B44792 | WO200058336-A1 | Neural/Sensory |
| HUFAO92 | B44795 | WO200058336-A1 | Digestive, Reproductive |
| HTWFA21 | B44799 | WO200058336-A1 | Immune/Hematopoietic |
| HSDKE82 | B44802 | WO200058336-A1 | Neural/Sensory |
| HMAJS26 | B44803 | WO200058336-A1 | Cancer |
| HKGAP57 | B44811 | WO200058336-A1 | Immune/Hematopoietic |
| HCWUW24 | B44831 | WO200055176-A2 | Immune/Hematopoietic |
| HDPAE80 | B44832 | WO200055176-A2 | Cancer |
| HCUFE33 | B44833 | WO200055176-A2 | Immune/Hematopoietic |
| HCUFJ09 | B44834 | WO200055176-A2 | Cancer |
| HCUGR26 | B44840 | WO200055176-A2 | Immune/Hematopoietic |
| HCUHM71 | B44844 | WO200055176-A2 | Immune/Hematopoietic, Musculoskeletal |
| HCWAK88 | B44847 | WO200055176-A2 | Immune/Hematopoietic |
| HCWFK03 | B44855 | WO200055176-A2 | Cancer |
| HCWHT52 | B44858 | WO200055176-A2 | Immune/Hematopoietic |
| HCWKO32 | B44859 | WO200055176-A2 | Immune/Hematopoietic |
| HCWUF93 | B44861 | WO200055176-A2 | Cancer |
| HDACJ52 | B44865 | WO200055176-A2 | Cancer |
| HDFAB86 | B44866 | WO200055176-A2 | Mixed Fetal, Neural/Sensory |
| HDHAA55 | B44870 | WO200055176-A2 | Immune/Hematopoietic, Neural/Sensory |
| HDHEB12 | B44871 | WO200055176-A2 | Immune/Hematopoietic, Neural/Sensory |
| HDHIA16 | B44874 | WO200055176-A2 | Cancer |
| HDHIA26 | B44875 | WO200055176-A2 | Neural/Sensory |
| HARNB17 | B44909 | WO200055176-A2 | Cancer |
| HBKEE60 | B44917 | WO200055200-A1 | Digestive |
| HBMWJ92 | B44920 | WO200055200-A1 | Cancer |
| HBMXW83 | B44924 | WO200055200-A1 | Cancer |
| HCE3R01 | B44926 | WO200055200-A1 | Cancer |
| HBNBJ76 | B44930 | WO200055200-A1 | Cancer |
| HBQAC72 | B44935 | WO200055200-A1 | Neural/Sensory |
| HBSAJ63 | B44937 | WO200055200-A1 | Cancer |
| HATDE03 | B44938 | WO200055200-A1 | Cancer |
| HBSDD24 | B44939 | WO200055200-A1 | Cancer |
| HBWBD25 | B44940 | WO200055200-A1 | Immune/Hematopoietic, Neural/Sensory |
| HBXBM24 | B44943 | WO200055200-A1 | Neural/Sensory |
| HBXBM78 | B44944 | WO200055200-A1 | Cancer |
| HBNAX40 | B44947 | WO200055200-A1 | Cancer |
| HBXCQ03 | B44949 | WO200055200-A1 | Cancer |
| HBXFI33 | B44955 | WO200055200-A1 | Immune/Hematopoietic, Neural/Sensory |
| HBXGE12 | B44958 | WO200055200-A1 | Cancer |
| HCDAA24 | B44960 | WO200055200-A1 | Cancer |
| HCDAH02 | B44962 | WO200055200-A1 | Immune/Hematopoietic, Musculoskeletal |
| HCDAR40 | B44964 | WO200055200-A1 | Cardiovascular, Immune/Hematopoietic, |
| | | | Musculoskeletal |
| HCDBE76 | B44965 | WO200055200-A1 | Cancer |
| HCDBO32 | B44966 | WO200055200-A1 | Cancer |
| HTDAF68 | B45025 | WO200058357-A1 | Immune/Hematopoietic |
| HTWFA88 | B45027 | WO200058357-A1 | Digestive, Immune/Hematopoietic |
| HSDJV40 | B45028 | WO200058357-A1 | Immune/Hematopoietic, Neural/Sensory |
| HSDKA64 | B45029 | WO200058357-A1 | Immune/Hematopoietic, Neural/Sensory |
| HRAAC36 | B45030 | WO200058357-A1 | Excretory, Immune/Hematopoietic |
| HPRCF50 | B45031 | WO200058357-A1 | Cancer |
| HUSXP50 | B45034 | WO200058357-A1 | Cardiovascular, Reproductive |
| HSSFP88 | B45035 | WO200058357-A1 | Cancer |
| HOVBS68 | B45037 | WO200058357-A1 | Cancer |
| HOVCO53 | B45039 | WO200058357-A1 | Reproductive |
| HOVBI16 | B45040 | WO200058357-A1 | Cancer |
| HOSFR35 | B45041 | WO200058357-A1 | Cancer |
| HNTRB25 | B45042 | WO200058357-A1 | Cancer |
| HUFBP77 | B45043 | WO200058357-A1 | Cancer |
| HUFAP33 | B45044 | WO200058357-A1 | Cancer |
| HSDHD05 | B45045 | WO200058357-A1 | Neural/Sensory |
| HTWFM85 | B45046 | WO200058357-A1 | Cancer |
| HSDJC96 | B45048 | WO200058357-A1 | Cancer |
| HTXKH40 | B45050 | WO200058357-A1 | Cancer |
| HPQCI62 | B45051 | WO200058357-A1 | Cancer |
| HOFMJ65 | B45053 | WO200058357-A1 | Cancer |
| HMUAN45 | B45057 | WO200058357-A1 | Cancer |
| HAJAB88 | B45059 | WO200058357-A1 | Cancer |
| HPTTT62 | B45067 | WO200058357-A1 | Cancer |
| HSRDW57 | B45071 | WO200058357-A1 | Cancer |
| HSRDW57 | B45118 | WO200058357-A1 | Cancer |
| HJBCG74 | B45121 | WO200058467-A1 | Cancer |
| HCECO77 | B45124 | WO200058467-A1 | Cancer |
| HJABC58 | B45129 | WO200058467-A1 | Cancer |
| HJMBK59 | B45140 | WO200058467-A1 | Cancer |
| HJMBP01 | B45141 | WO200058467-A1 | Cancer |
| HJMBW62 | B45143 | WO200058467-A1 | Reproductive |
| HJPAQ19 | B45146 | WO200058467-A1 | Cancer |
| HJPBN96 | B45148 | WO200058467-A1 | Cancer |
| HJPBK28 | B45149 | WO200058467-A1 | Cancer |
| HKABN63 | B45152 | WO200058467-A1 | Cancer |
| HKAFF50 | B45159 | WO200058467-A1 | Cancer |
| HKMSB01 | B45166 | WO200058467-A1 | Cancer |
| HISEJ52 | B45171 | WO200058467-A1 | Cancer |
| HJBCG74 | B45174 | WO200058467-A1 | Cancer |
| HJBCG74 | B45175 | WO200058467-A1 | Cancer |
| HOFNY15 | B45227 | WO200063230-A2 | Reproductive |
| HNTAF42 | B45228 | WO200063230-A2 | Cancer |
| HPJAW78 | B45233 | WO200063230-A2 | Immune/Hematopoietic, Musculoskeletal, |
| | | | Reproductive |
| HPJBS16 | B45234 | WO200063230-A2 | Connective/Epithelial, Reproductive |
| HPJCV35 | B45236 | WO200063230-A2 | Reproductive |
| HSNAH56 | B45239 | WO200063230-A2 | Cancer |
| HE2FE89 | B45246 | WO200063230-A2 | Cardiovascular, Digestive, Mixed Fetal |
| HPVAF86 | B45249 | WO200063230-A2 | Reproductive |
| HOGCD78 | B45257 | WO200063230-A2 | Reproductive |
| HRABU56 | B45264 | WO200063230-A2 | Cardiovascular, Excretory, Musculoskeletal |
| HCUBY47 | B45267 | WO200063230-A2 | Digestive, Immune/Hematopoietic |
| HUDBE20 | B45270 | WO200063230-A2 | Reproductive |
| HUDBK47 | B45271 | WO200063230-A2 | Immune/Hematopoietic, Reproductive |
| HSOAH16 | B45318 | WO200061628-A1 | Digestive |
| HWTBX66 | B45320 | WO200061628-A1 | Cancer |
| HTXDO17 | B45321 | WO200061628-A1 | Immune/Hematopoietic, Neural/Sensory, |
| | | | Respiratory |
| HSSDQ20 | B45325 | WO200061628-A1 | Musculoskeletal, Neural/Sensory |
| HTOHM82 | B45329 | WO200061628-A1 | Cancer |
| HTOIH51 | B45333 | WO200061628-A1 | Immune/Hematopoietic |
| HHLBA86 | B45334 | WO200061628-A1 | Digestive |
| HTAEH58 | B45335 | WO200061628-A1 | Immune/Hematopoietic |
| HLTCO22 | B45338 | WO200061628-A1 | Cancer |
| HTOJS23 | B45343 | WO200061628-A1 | Immune/Hematopoietic |
| HNHBE21 | B45356 | WO200061628-A1 | Immune/Hematopoietic |
| HSSFE38 | B45387 | WO200061627-A1 | Cancer |
| HTOGB79 | B45388 | WO200061627-A1 | Cancer |
| HKABU43 | B45389 | WO200061627-A1 | Cancer |
| HSYBV44 | B45398 | WO200061627-A1 | Immune/Hematopoietic |
| HOHBZ10 | B45399 | WO200061627-A1 | Cancer |
| HWAAQ28 | B45400 | WO200061627-A1 | Cancer |
| HWBBQ70 | B45402 | WO200061627-A1 | Immune/Hematopoietic, Neural/Sensory |
| HWBCN36 | B45403 | WO200061627-A1 | Immune/Hematopoietic |
| HWBCP16 | B45404 | WO200061627-A1 | Immune/Hematopoietic |
| HWHGW09 | B45406 | WO200061627-A1 | Cancer |
| HWHHA21 | B45407 | WO200061627-A1 | Connective/Epithelial |
| HYABE50 | B45408 | WO200061627-A1 | Cancer |
| HBXFA04 | B45411 | WO200061627-A1 | Neural/Sensory |
| HPRCA64 | B45412 | WO200061627-A1 | Cancer |
| HTXAA20 | B45414 | WO200061627-A1 | Cancer |
| HOFAA78 | B45423 | WO200061627-A1 | Reproductive |
| HTOGR38 | B45427 | WO200061627-A1 | Immune/Hematopoietic |
| HUKBT67 | B45431 | WO200061627-A1 | Cancer |
| HCEMU42 | B45432 | WO200061627-A1 | Cancer |
| HWHPB78 | B45433 | WO200061627-A1 | Cancer |
| HSYBV44 | B45452 | WO200061627-A1 | Immune/Hematopoietic |
| HNHEN70 | B45699 | WO200071584-A1 | Cancer |
| HLYBN81 | B45700 | WO200071584-A1 | Cancer |
| H7TME50 | B45701 | WO200071584-A1 | Cancer |
| HDPWP65 | B45702 | WO200071584-A1 | Cancer |
| HDTIE58 | B45703 | WO200071584-A1 | Cardiovascular, Connective/Epithelial, |
| | | | Immune/Hematopoietic |
| H7TPC96 | B45704 | WO200071584-A1 | Cancer |
| H7MAD52 | B45705 | WO200071584-A1 | Reproductive |
| HYASC03 | B49502 | WO200070076-A1 | Endocrine, Immune/Hematopoietic |
| HCE1K90 | B49503 | WO200070076-A1 | Cancer |
| HNTMH2C | B49504 | WO200070076-A1 | Cancer |
| HE8EJ16 | B49505 | WO200070076-A1 | Mixed Fetal, Neural/Sensory, Reproductive |
| HFEBD57 | B49506 | WO200070076-A1 | Cancer |
| HOFAD65 | B49507 | WO200070076-A1 | Cancer |
| HAPRB43 | B49508 | WO200070076-A1 | Cancer |
| HCE1K90 | B49509 | WO200070076-A1 | Cancer |
| HE8EJ16 | B49510 | WO200070076-A1 | Mixed Fetal, Neural/Sensory, Reproductive |
| HFEBD57 | B49511 | WO200070076-A1 | Cancer |
| HFEBD57 | B49512 | WO200070076-A1 | Cancer |
| HOFAD65 | B49513 | WO200070076-A1 | Cancer |
| HFPEY75 | B49533 | WO200061774-A2 | Cancer |
| HOHEC84 | B49534 | WO200061774-A2 | Immune/Hematopoietic, Musculoskeletal |
| HFKCD20 | B49535 | WO200061774-A2 | Cancer |
| HKMLR17 | B49536 | WO200061774-A2 | Cancer |
| HTHCW70 | B49537 | WO200061774-A2 | Cancer |
| HOHEC84 | B49538 | WO200061774-A2 | Immune/Hematopoietic, Musculoskeletal |
| HOUCQ17 | B50011 | WO200071577-A1 | Cancer |
| HMADD44 | B50378 | WO200061614-A2 | Cancer |
| HDQER52 | B50379 | WO200061614-A2 | Cancer |
| HTELM46 | B50380 | WO200061614-A2 | Digestive, Immune/Hematopoietic, Reproductive |
| HDPUS73 | B50381 | WO200061614-A2 | Cancer |
| HFCDT50 | B50382 | WO200061614-A2 | Cancer |
| HEMGR64 | B50383 | WO200061614-A2 | Cancer |
| HHFDM26 | B50384 | WO200061614-A2 | Cancer |
| HTTIA36 | B50385 | WO200061614-A2 | Cancer |
| HDQHP22 | B50387 | WO200061614-A2 | Cancer |
| HRDCD90 | B50388 | WO200061614-A2 | Cancer |
| HEOMG91 | B50389 | WO200061614-A2 | Cancer |
| HSLGK66 | B50390 | WO200061614-A2 | Cancer |
| HSIFX64 | B50391 | WO200061614-A2 | Cancer |
| HETCD80 | B50392 | WO200061614-A2 | Reproductive |
| HHSGB09 | B50393 | WO200061614-A2 | Cancer |
| HLWBT44 | B50394 | WO200061614-A2 | Cancer |
| HTLJG95 | B50395 | WO200061614-A2 | Cancer |
| HDPDH32 | B50935 | WO200073323-A2 | Immune/Hematopoietic |
| HHFMQ22 | B50936 | WO200073323-A2 | Cancer |
| HETCM67 | B50937 | WO200073323-A2 | Cancer |
| HWBDU78 | B50938 | WO200073323-A2 | Cancer |
| HTXEM16 | B50939 | WO200073323-A2 | Cancer |
| HBJEM23 | B50940 | WO200073323-A2 | Cardiovascular, Musculoskeletal, Reproductive |
| H7TMD22 | B50941 | WO200073323-A2 | Neural/Sensory |
| HDPDH32 | B50942 | WO200073323-A2 | Immune/Hematopoietic |
| HDPDH32 | B50943 | WO200073323-A2 | Immune/Hematopoietic |
| HSQAX94 | B51382 | WO200058495-A1 | Cancer |
| HTOFA11 | B51383 | WO200058495-A1 | Cancer |
| HFFAH01 | B51384 | WO200058495-A1 | Digestive, Immune/Hematopoietic, Neural/Sensory |
| HNHBI65 | B51385 | WO200058495-A1 | Immune/Hematopoietic |
| HNHCP14 | B51386 | WO200058495-A1 | Immune/Hematopoietic |
| HEAAW54 | B51387 | WO200058495-A1 | Reproductive |
| HSRDM56 | B51393 | WO200058495-A1 | Cancer |
| HSAXL82 | B51397 | WO200058495-A1 | Immune/Hematopoietic |
| HCE3L04 | B51398 | WO200058495-A1 | Neural/Sensory |
| HEBGM06 | B51402 | WO200058495-A1 | Cancer |
| HTWBO30 | B51403 | WO200058495-A1 | Cancer |
| HSSJF26 | B51404 | WO200058495-A1 | Musculoskeletal |
| HUKAD46 | B51412 | WO200058495-A1 | Endocrine, Immune/Hematopoietic, Reproductive |
| HPDDT14 | B51413 | WO200058495-A1 | Cancer |
| HTEDF78 | B51415 | WO200058495-A1 | Reproductive |
| HSUSB73 | B51416 | WO200058495-A1 | Immune/Hematopoietic, Reproductive |
| HSRAA81 | B51417 | WO200058495-A1 | Cancer |
| HCABW10 | B51420 | WO200058495-A1 | Cancer |
| HTWAM19 | B51422 | WO200058495-A1 | Immune/Hematopoietic |
| HSDZO08 | B51620 | WO200061620-A1 | Cancer |
| HSLHX15 | B51624 | WO200061620-A1 | Musculoskeletal |
| HSNBM34 | B51625 | WO200061620-A1 | Digestive |
| HSWBE76 | B51629 | WO200061620-A1 | Cancer |
| HSXAS59 | B51630 | WO200061620-A1 | Neural/Sensory |
| HSXAY60 | B51631 | WO200061620-A1 | Cancer |
| HTEDX07 | B51635 | WO200061620-A1 | Cancer |
| HTEJY20 | B51640 | WO200061620-A1 | Cancer |
| HLDQU79 | B51645 | WO200061620-A1 | Cancer |
| HTLBT80 | B51646 | WO200061620-A1 | Cancer |
| HTEAF65 | B51648 | WO200061620-A1 | Excretory, Reproductive |
| HTNBJ15 | B51649 | WO200061620-A1 | Cancer |
| HOUEP77 | B51650 | WO200061620-A1 | Cancer |
| HTOJL95 | B51651 | WO200061620-A1 | Cancer |
| HTTDN24 | B51653 | WO200061620-A1 | Cancer |
| HTXAD75 | B51655 | WO200061620-A1 | Cancer |
| HTXDJ21 | B51657 | WO200061620-A1 | Immune/Hematopoietic |
| HKB1E57 | B51658 | WO200061620-A1 | Cancer |
| HAQBZ15 | B51659 | WO200061620-A1 | Cancer |
| HMWAB92 | B51661 | WO200061620-A1 | Cancer |
| HSNBL85 | B51663 | WO200061620-A1 | Cancer |
| HWBDJ08 | B51664 | WO200061620-A1 | Cancer |
| HYABC84 | B51667 | WO200061620-A1 | Cancer |
| HTEDX07 | B51682 | WO200061620-A1 | Cancer |
| HOUHQ36 | B51724 | WO200061625-A1 | Connective/Epithelial |
| HOUIG92 | B51726 | WO200061625-A1 | Cancer |
| HSAZP90 | B51728 | WO200061625-A1 | Immune/Hematopoietic |
| HSPAY90 | B51730 | WO200061625-A1 | Cancer |
| HWHPU44 | B51731 | WO200061625-A1 | Connective/Epithelial |
| HWACZ33 | B51734 | WO200061625-A1 | Digestive, Immune/Hematopoietic, Reproductive |
| HRADA42 | B51736 | WO200061625-A1 | Cancer |
| HRADN25 | B51737 | WO200061625-A1 | Cancer |
| HRADN25 | B51738 | WO200061625-A1 | Cancer |
| HRADT25 | B51739 | WO200061625-A1 | Digestive, Excretory |
| HRADT25 | B51740 | WO200061625-A1 | Digestive, Excretory |
| HOHEC84 | B51741 | WO200061625-A1 | Immune/Hematopoietic, Musculoskeletal |
| HRADU15 | B51742 | WO200061625-A1 | Excretory |
| HWDAG96 | B51743 | WO200061625-A1 | Cancer |
| HWDAJ01 | B51745 | WO200061625-A1 | Connective/Epithelial |
| HMBSF85 | B51749 | WO200061625-A1 | Cancer |
| HRGSE38 | B51752 | WO200061625-A1 | Cancer |
| HTLBF46 | B51755 | WO200061625-A1 | Cancer |
| HSRHB59 | B51761 | WO200061625-A1 | Cancer |
| HRDDQ39 | B51762 | WO200061625-A1 | Cancer |
| HJPCH08 | B51766 | WO200061625-A1 | Cancer |
| HOEBJ70 | B51767 | WO200061625-A1 | Cancer |
| HDQER52 | B51795 | WO200061625-A1 | Cancer |
| HTLBF63 | B51827 | WO200061626-A1 | Cancer |
| HTOAT56 | B51828 | WO200061626-A1 | Cancer |
| HSSMY35 | B51829 | WO200061626-A1 | Cancer |
| HBHAA81 | B51840 | WO200061626-A1 | Cancer |
| HOQBG21 | B51841 | WO200061626-A1 | Cancer |
| HTPCG10 | B51842 | WO200061626-A1 | Cancer |
| HSHAX04 | B51848 | WO200061626-A1 | Cancer |
| HPEAD23 | B51850 | WO200061626-A1 | Cancer |
| HODDN21 | B51857 | WO200061626-A1 | Reproductive |
| HOABH36 | B51859 | WO200061626-A1 | Cancer |
| HOACG07 | B51860 | WO200061626-A1 | Cancer |
| HPMDA80 | B51864 | WO200061626-A1 | Cancer |
| HSKCQ51 | B51865 | WO200061626-A1 | Cancer |
| HRDDS22 | B51870 | WO200061626-A1 | Cancer |
| HTXDT72 | B51871 | WO200061626-A1 | Cancer |
| HTXDG92 | B51873 | WO200061626-A1 | Cancer |
| HTXES13 | B51874 | WO200061626-A1 | Cancer |
| HSSEF77 | B51875 | WO200061626-A1 | Cancer |
| HTEGH03 | B51883 | WO200061626-A1 | Cancer |
| HLMJB64 | B51933 | WO200058334-A1 | Cancer |
| HLMNA19 | B51936 | WO200058334-A1 | Cardiovascular, Immune/Hematopoietic |
| HLQAM30 | B51937 | WO200058334-A1 | Cancer |
| HLQCX36 | B51942 | WO200058334-A1 | Digestive |
| HLQCY09 | B51943 | WO200058334-A1 | Digestive |
| HLQDM47 | B51947 | WO200058334-A1 | Digestive |
| HLQDU77 | B51948 | WO200058334-A1 | Cancer |
| HLTDA14 | B51952 | WO200058334-A1 | Immune/Hematopoietic |
| HLTDK30 | B51955 | WO200058334-A1 | Cancer |
| HLTDX04 | B51958 | WO200058334-A1 | Cancer |
| HLWAU42 | B51964 | WO200058334-A1 | Cancer |
| HLWAW73 | B51965 | WO200058334-A1 | Cancer |
| HLWAX50 | B51966 | WO200058334-A1 | Cancer |
| HLW8J93 | B51968 | WO200058334-A1 | Cancer |
| HLWCN37 | B51970 | WO200058334-A1 | Cancer |
| HLYAL28 | B51975 | WO200058334-A1 | Immune/Hematopoietic |
| HFXDR47 | B52012 | WO200061596-A1 | Cancer |
| HNHHB10 | B52017 | WO200061596-A1 | Immune/Hematopoietic, Reproductive |
| HPTRI42 | B52019 | WO200061596-A1 | Cancer |
| HTWCE14 | B52020 | WO200061596-A1 | Cancer |
| HPTVH59 | B52025 | WO200061596-A1 | Endocrine, Neural/Sensory |
| HUSGU40 | B52027 | WO200061596-A1 | Cancer |
| HUSYG26 | B52028 | WO200061596-A1 | Cancer |
| HOVCJ71 | B52029 | WO200061596-A1 | Reproductive |
| HSKYR49 | B52034 | WO200061596-A1 | Cancer |
| HTWEG06 | B52040 | WO200061596-A1 | Immune/Hematopoietic |
| HSDJF04 | B52041 | WO200061596-A1 | Cancer |
| HPQAN50 | B52044 | WO200061596-A1 | Reproductive |
| HT5FX76 | B52051 | WO200061596-A1 | Cancer |
| HT5FX79 | B52052 | WO200061596-A1 | Cancer |
| HNTRQ40 | B52053 | WO200061596-A1 | Cancer |
| HOUFS04 | B52057 | WO200061596-A1 | Cancer |
| HOGAR71 | B52059 | WO200061596-A1 | Cancer |
| HOFNB74 | B52060 | WO200061596-A1 | Reproductive |
| HOGAR71 | B52101 | WO200061596-A1 | Cancer |
| H7TDB54 | B52104 | WO200061624-A1 | Cancer |
| HOSEM81 | B52105 | WO200061624-A1 | Cancer |
| HTXKF95 | B52108 | WO200061624-A1 | Cancer |
| HTGGM44 | B52113 | WO200061624-A1 | Immune/Hematopoietic, Musculoskeletal |
| HROBJ10 | B52114 | WO200061624-A1 | Cancer |
| HTXLC05 | B52118 | WO200061624-A1 | Digestive, Immune/Hematopoietic, Respiratory |
| HTXLC45 | B52119 | WO200061624-A1 | Immune/Hematopoietic |
| HNHLD80 | B52120 | WO200061624-A1 | Immune/Hematopoietic |
| HNGKT41 | B52124 | WO200061624-A1 | Immune/Hematopoietic |
| HNHMP15 | B52125 | WO200061624-A1 | Immune/Hematopoietic |
| HNHMY76 | B52127 | WO200061624-A1 | Immune/Hematopoietic, Reproductive |
| HNHND14 | B52129 | WO200061624-A1 | Immune/Hematopoietic |
| HNHOF09 | B52131 | WO200061624-A1 | Immune/Hematopoietic |
| HODEM38 | B52132 | WO200061624-A1 | Digestive, Immune/Hematopoietic, Reproductive |
| HNGMW45 | B52137 | WO200061624-A1 | Immune/Hematopoietic |
| HNGNK44 | B52139 | WO200061624-A1 | Immune/Hematopoietic |
| HTLGL33 | B52145 | WO200061624-A1 | Reproductive |
| HTLGY50 | B52146 | WO200061624-A1 | Cancer |
| HNGKY94 | B52147 | WO200061624-A1 | Immune/Hematopoietic |
| HTXNV66 | B52150 | WO200061624-A1 | Cancer |
| HRODG74 | B53274 | WO200055351-A1 | Cancer |
| HTTDO45 | B53323 | WO200055351-A1 | Cancer |
| HSIFY77 | B53335 | WO200055351-A1 | Cancer |
| HWMIW26 | B53358 | WO200055351-A1 | Cancer |
| HEAHA84 | B53397 | WO200055351-A1 | Cancer |
| HBKDN33 | B53414 | WO200055351-A1 | Cancer |
| HKAIL83 | B53430 | WO200055351-A1 | Cancer |
| HBMSK08 | B53503 | WO200055351-A1 | Cancer |
| HTELE03 | B53617 | WO200055351-A1 | Cancer |
| HSWAR63 | B53774 | WO200055351-A1 | Reproductive |
| HFXAM85 | B54142 | WO200055320-A1 | Cancer |
| HISCO10 | B54185 | WO200055320-A1 | Digestive |
| HISBT02 | B54226 | WO200055320-A1 | Digestive |
| HNHLV34 | B54251 | WO200055320-A1 | Cancer |
| HUSXO71 | B54257 | WO200055320-A1 | Cardiovascular, Immune/Hematopoietic, |
| | | | Reproductive |
| HLWBY67 | B54277 | WO200055320-A1 | Cancer |
| HUVDP63 | B54282 | WO200055320-A1 | Cancer |
| HSTAH26 | B54290 | WO200055320-A1 | Connective/Epithelial |
| HWLXE16 | B54305 | WO200055320-A1 | Digestive |
| HDQEG93 | B54316 | WO200055320-A1 | Cancer |
| HSLJG12 | B54341 | WO200055320-A1 | Cancer |
| HAOSL81 | B54358 | WO200055320-A1 | Cancer |
| HOFNH33 | B54374 | WO200055320-A1 | Reproductive |
| HAJBV26 | B56077 | WO200070042-A1 | Cancer |
| HAPOC74 | B56078 | WO200070042-A1 | Excretory, Immune/Hematopoietic, Reproductive |
| HATEI47 | B56079 | WO200070042-A1 | Endocrine |
| HNHGD15 | B56080 | WO200070042-A1 | Immune/Hematopoietic |
| HRKAB52 | B56081 | WO200070042-A1 | Cancer |
| HKGAT94 | B56082 | WO200070042-A1 | Digestive, Reproductive |
| HODAH46 | B56083 | WO200070042-A1 | Cancer |
| HASCE69 | B56084 | WO200070042-A1 | Cancer |
| HBNBE21 | B56085 | WO200070042-A1 | Cancer |
| HFLSH80 | B56086 | WO200070042-A1 | Cancer |
| HRACM44 | B56087 | WO200070042-A1 | Excretory, Immune/Hematopoietic |
| HBXFR04 | B56090 | WO200070042-A1 | Neural/Sensory |
| HNHFM14 | B56094 | WO200070042-A1 | Cancer |
| HEBCM27 | B56095 | WO200070042-A1 | Cancer |
| HNHBM80 | B56096 | WO200070042-A1 | Immune/Hematopoietic, Reproductive |
| HTEAR66 | B56098 | WO200070042-A1 | Reproductive |
| HTLDW38 | B56099 | WO200070042-A1 | Immune/Hematopoietic, Neural/Sensory, |
| | | | Reproductive |
| HTOFD28 | B56100 | WO200070042-A1 | Immune/Hematopoietic |
| HFPBW41 | B56101 | WO200070042-A1 | Neural/Sensory |
| HTSAC80 | B56102 | WO200070042-A1 | Cancer |
| HANGD45 | B56103 | WO200070042-A1 | Musculoskeletal |
| HNGJL11 | B56106 | WO200070042-A1 | Immune/Hematopoietic, Musculoskeletal |
| HYBBE75 | B56108 | WO200070042-A1 | Musculoskeletal |
| HCWDS72 | B56109 | WO200070042-A1 | Cancer |
| HKPAD17 | B56110 | WO200070042-A1 | Excretory |
| HTLGY87 | B56114 | WO200070042-A1 | Cancer |
| HULAG01 | B56115 | WO200070042-A1 | Cardiovascular |
| HYAAJ71 | B56116 | WO200070042-A1 | Immune/Hematopoietic |
| HE9HY07 | B56118 | WO200070042-A1 | Mixed Fetal, Reproductive |
| HLSAF81 | B56121 | WO200070042-A1 | Cancer |
| HNGAU09 | B56123 | WO200070042-A1 | Immune/Hematopoietic |
| HTEID16 | B56124 | WO200070042-A1 | Reproductive |
| HTWKE60 | B56125 | WO200070042-A1 | Immune/Hematopoietic |
| HHLAB61 | B56127 | WO200070042-A1 | Digestive |
| HRLMB56 | B56128 | WO200070042-A1 | Cancer |
| HCUDW10 | B56131 | WO200070042-A1 | Cancer |
| HNGIQ46 | B56133 | WO200070042-A1 | Immune/Hematopoietic |
| H7TMD22 | B56135 | WO200070042-A1 | Neural/Sensory |
| HHFCJ31 | B56136 | WO200070042-A1 | Cardiovascular, Connective/Epithelial, |
| | | | Reproductive |
| HLDBW08 | B56137 | WO200070042-A1 | Digestive |
| H6EEW15 | B56139 | WO200070042-A1 | Cancer |
| HNHBM26 | B56142 | WO200070042-A1 | Immune/Hematopoietic, Reproductive |
| HFIVA74 | B56144 | WO200070042-A1 | Musculoskeletal, Reproductive |
| HPWAG46 | B56145 | WO200070042-A1 | Cancer |
| HBJFM34 | B56146 | WO200070042-A1 | Immune/Hematopoietic |
| HRDDS01 | B56147 | WO200070042-A1 | Musculoskeletal |
| HGBDHS3 | B56152 | WO200070042-A1 | Cancer |
| HMKCV28 | B56154 | WO200070042-A1 | Neural/Sensory |
| HPLAT69 | B56155 | WO200070042-A1 | Cancer |
| HNGBJ27 | B56157 | WO200070042-A1 | Immune/Hematopoietic |
| HFXHO83 | B56158 | WO200070042-A1 | Cancer |
| HKGAM07 | B56159 | WO200070042-A1 | Digestive, Endocrine |
| HTXFE73 | B56160 | WO200070042-A1 | Cancer |
| HEBBN36 | B56163 | WO200070042-A1 | Cancer |
| HJPCY06 | B56164 | WO200070042-A1 | Cancer |
| HTEGS19 | B56165 | WO200070042-A1 | Cancer |
| HMJAK63 | B56166 | WO200070042-A1 | Neural/Sensory |
| HNHGE75 | B56170 | WO200070042-A1 | Immune/Hematopoietic |
| HMELA16 | B56171 | WO200070042-A1 | Cardiovascular, Immune/Hematopoietic |
| HNGAJ15 | B56172 | WO200070042-A1 | Immune/Hematopoietic, Neural/Sensory |
| HNHHD40 | B56173 | WO200070042-A1 | Cancer |
| HFPAA06 | B56177 | WO200070042-A1 | Cancer |
| HNGIH43 | B56180 | WO200070042-A1 | Immune/Hematopoietic, Reproductive |
| HLSAD65 | B56182 | WO200070042-A1 | Cancer |
| HMDAK33 | B56183 | WO200070042-A1 | Neural/Sensory |
| HNALC70 | B56184 | WO200070042-A1 | Cancer |
| HOUCW42 | B56185 | WO200070042-A1 | Connective/Epithelial |
| HLMMX46 | B56186 | WO200070042-A1 | Immune/Hematopoietic |
| HHSDI68 | B56188 | WO200070042-A1 | Neural/Sensory |
| HLMIV11 | B56190 | WO200070042-A1 | Immune/Hematopoietic |
| HBMCI50 | B56193 | WO200070042-A1 | Immune/Hematopoietic |
| HCRAI47 | B56195 | WO200070042-A1 | Cancer |
| HNHEU34 | B56198 | WO200070042-A1 | Immune/Hematopoietic |
| HPFCR15 | B56199 | WO200070042-A1 | Digestive, Mixed Fetal, Reproductive |
| HNGJM27 | B56201 | WO200070042-A1 | Immune/Hematopoietic |
| HNHEL19 | B56202 | WO200070042-A1 | Immune/Hematopoietic, Reproductive |
| HGOCD38 | B56204 | WO200070042-A1 | Cancer |
| HHGCG53 | B56205 | WO200070042-A1 | Cancer |
| HHSBJ93 | B56206 | WO200070042-A1 | Digestive, Immune/Hematopoietic, Neural/Sensory |
| HLHDS79 | B56208 | WO200070042-A1 | Cancer |
| HNHEA64 | B56209 | WO200070042-A1 | Immune/Hematopoietic |
| HOVAZ13 | B56211 | WO200070042-A1 | Cancer |
| HHGBK24 | B56214 | WO200070042-A1 | Cancer |
| HILCG67 | B56215 | WO200070042-A1 | Cancer |
| HOSFC36 | B56218 | WO200070042-A1 | Cancer |
| HKGAT94 | B56220 | WO200070042-A1 | Digestive, Reproductive |
| HBNBE21 | B56221 | WO200070042-A1 | Cancer |
| HFLSH80 | B56222 | WO200070042-A1 | Cancer |
| HGBDH53 | B56227 | WO200070042-A1 | Cancer |
| HMELA16 | B56230 | WO200070042-A1 | Cardiovascular, Immune/Hematopoietic |
| HNGAJ15 | B56231 | WO200070042-A1 | Immune/Hematopoietic, Neural/Sensory |
| HCRAI47 | B56232 | WO200070042-A1 | Cancer |
| HNHEL19 | B56233 | WO200070042-A1 | Immune/Hematopoietic, Reproductive |
| HOSFC36 | B56236 | WO200070042-A1 | Cancer |
| HHSBJ93 | B56351 | WO200070042-A1 | Digestive, Immune/Hematopoietic, Neural/Sensory |
| HJAAT54 | B56364 | WO200055174-A1 | Cancer |
| HPCQS73 | B56431 | WO200055174-A1 | Cancer |
| HPRTL26 | B56435 | WO200055174-A1 | Reproductive |
| HPFEA08 | B56518 | WO200055174-A1 | Reproductive |
| HTEPF49 | B56536 | WO200055174-A1 | Cancer |
| HOFAC67 | B56601 | WO200055174-A1 | Reproductive |
| HNTBH70 | B56606 | WO200055174-A1 | Cancer |
| HMQAI69 | B56630 | WO200055174-A1 | Cancer |
| HDPBI36 | B56671 | WO200055174-A1 | Cancer |
| HL2AH06 | B56687 | WO200055174-A1 | Immune/Hematopoietic |
| HHEPI21 | B56725 | WO200055174-A1 | Cancer |
| HAIBC14 | B56739 | WO200055174-A1 | Cancer |
| HDQGM08 | B56749 | WO200055174-A1 | Cancer |
| HWHPD31 | B56788 | WO200055174-A1 | Cancer |
| HPJCY94 | B56791 | WO200055174-A1 | Musculoskeletal, Reproductive |
| HDSAK19 | B56816 | WO200055174-A1 | Cancer |
| HTTFG83 | B56820 | WO200055174-A1 | Reproductive |
| HDPVR90 | B56824 | WO200055174-A1 | Cancer |
| HSLJW05 | B56860 | WO200055174-A1 | Cancer |
| HHEPE84 | B56876 | WO200055174-A1 | Cancer |
| HE2LW65 | B56909 | WO200055174-A1 | Cancer |
| HPRTI79 | B56925 | WO200055174-A1 | Cancer |
| HEQAN39 | B56926 | WO200055174-A1 | Cancer |
| HEMFC70 | B56931 | WO200055174-A1 | Cancer |
| HELGM94 | B56937 | WO200055174-A1 | Cancer |
| HDHMB78 | B56950 | WO200055174-A1 | Cancer |
| HDPQE64 | B56987 | WO200055174-A1 | Cancer |
| HDPBQ32 | B56996 | WO200055174-A1 | Cancer |
| HBXGB85 | B57056 | WO200055174-A1 | Neural/Sensory |
| HBUAC02 | B57061 | WO200055174-A1 | Cancer |
| HOCOT88 | B57077 | WO200055174-A1 | Cancer |
| HAJAT72 | B57101 | WO200055174-A1 | Reproductive |
| HPJAV43 | B57106 | WO200055174-A1 | Immune/Hematopoietic, Reproductive, Respiratory |
| HRODJ79 | B57121 | WO200055174-A1 | Cancer |
| HE8FD92 | B57128 | WO200055174-A1 | Cancer |
| HETAM53 | B57137 | WO200055174-A1 | Cancer |
| HCHBQ27 | B57159 | WO200055174-A1 | Reproductive |
| HAPSG03 | B58194 | WO200055180-A2 | Cancer |
| HHFFR04 | B58240 | WO200055180-A2 | Cancer |
| HCLSC85 | B58320 | WO200055180-A2 | Respiratory |
| HPAMC60 | B58368 | WO200055180-A2 | Cancer |
| HCE5E24 | B58386 | WO200055180-A2 | Cancer |
| HMADJ17 | B58396 | WO200055180-A2 | Cancer |
| HADCL25 | B58403 | WO200055180-A2 | Cancer |
| HWDAO40 | B58434 | WO200055180-A2 | Cancer |
| HRGBG45 | B58718 | WO200055173-A1 | Cancer |
| HOFMM27 | B58772 | WO200055173-A1 | Reproductive |
| HOFMH95 | B58829 | WO200055173-A1 | Reproductive |
| HEMFK40 | B58912 | WO200055173-A1 | Cancer |
| HODBC01 | B58913 | WO200055173-A1 | Reproductive |
| HOGAV29 | B58914 | WO200055173-A1 | Immune/Hematopoietic, Reproductive |
| HOFNL25 | B58917 | WO200055173-A1 | Reproductive |
| HOFMH12 | B58929 | WO200055173-A1 | Reproductive |
| HOFOC33 | B58932 | WO200055173-A1 | Reproductive |
| HSIFL06 | B58996 | WO200055173-A1 | Cancer |
| HNHBE38 | B59469 | WO200077173-A1 | Cancer |
| HOPBP13 | B59470 | WO200077173-A1 | Cancer |
| HOUDE92 | B59472 | WO200077173-A1 | Cancer |
| HPQAJ27 | B59473 | WO200077173-A1 | Cancer |
| HTLEV48 | B59476 | WO200077173-A1 | Reproductive |
| HSPAI20 | B59478 | WO200077173-A1 | Digestive, Neural/Sensory |
| HSPAA89 | B59479 | WO200077173-A1 | Digestive |
| HTWEH94 | B59482 | WO200077173-A1 | Immune/Hematopoietic |
| HTEGS48 | B59490 | WO200077173-A1 | Reproductive |
| HTEIV65 | B59491 | WO200077173-A1 | Reproductive |
| HOSEI81 | B59494 | WO200077173-A1 | Digestive, Musculoskeletal |
| HOEFL74 | B59495 | WO200077173-A1 | Cardiovascular, Digestive, Musculoskeletal |
| HOGAA41 | B59497 | WO200077173-A1 | Cancer |
| HOFMT59 | B59499 | WO200077173-A1 | Reproductive |
| HSYBD33 | B59502 | WO200077173-A1 | Immune/Hematopoietic |
| HTOHO21 | B59503 | WO200077173-A1 | Immune/Hematopoietic |
| HTAED89 | B59504 | WO200077173-A1 | Immune/Hematopoietic |
| HUSCA09 | B60703 | WO200076531-A1 | Cancer |
| HBXCD59 | B60705 | WO200076531-A1 | Immune/Hematopoietic, Neural/Sensory |
| HDPSZ07 | B60706 | WO200076531-A1 | Immune/Hematopoietic |
| HCLCU75 | B60712 | WO200076531-A1 | Respiratory |
| HDABR74 | B60714 | WO200076531-A1 | Cancer |
| HSSEA64 | B60721 | WO200076531-A1 | Cancer |
| HSSJF96 | B60722 | WO200076531-A1 | Musculoskeletal |
| HT4FV41 | B60724 | WO200076531-A1 | Cancer |
| HBSAJ63 | B60725 | WO200076531-A1 | Cancer |
| HTODA92 | B60726 | WO200076531-A1 | Cancer |
| HTTCB60 | B60727 | WO200076531-A1 | Cancer |
| HTTEO25 | B60728 | WO200076531-A1 | Cancer |
| HTXDD61 | B60733 | WO200076531-A1 | Cancer |
| HTXJM94 | B60734 | WO200076531-A1 | Cancer |
| HWHRC51 | B60736 | WO200076531-A1 | Cancer |
| HAGFJ67 | B60737 | WO200076531-A1 | Digestive, Immune/Hematopoietic, Neural/Sensory |
| HBSAK32 | B60739 | WO200076531-A1 | Cancer |
| HCHCG33 | B60741 | WO200076531-A1 | Cancer |
| HE8FD92 | B60747 | WO200076531-A1 | Cancer |
| HSAWB58 | B63049 | WO200061748-A1 | Immune/Hematopoietic |
| HCE1T53 | B63050 | WO200061748-A1 | Neural/Sensory |
| HODCY44 | B63057 | WO200061748-A1 | Reproductive |
| HTEJF31 | B63072 | WO200061748-A1 | Reproductive |
| HTPCW21 | B63077 | WO200061748-A1 | Digestive, Neural/Sensory |
| HPFBA54 | B63082 | WO200061748-A1 | Reproductive |
| HSABG81 | B63083 | WO200061748-A1 | Cancer |
| HTECB02 | B63084 | WO200061748-A1 | Cancer |
| HTEDJ28 | B63086 | WO200061748-A1 | Cancer |
| HSLEC18 | B63092 | WO200061748-A1 | Cancer |
| HTSGO13 | B63095 | WO200061748-A1 | Cancer |
| HTLEM16 | B63096 | WO200061748-A1 | Cancer |
| HTXPD86 | B63136 | WO200061629-A1 | Cancer |
| HWLGP26 | B63137 | WO200061629-A1 | Cancer |
| HAJAY92 | B63141 | WO200061629-A1 | Cancer |
| HSYBZ94 | B63145 | WO200061629-A1 | Cancer |
| HPRBH85 | B63146 | WO200061629-A1 | Cancer |
| HTECE87 | B63147 | WO200061629-A1 | Cancer |
| HNHGD95 | B63148 | WO200061629-A1 | Cardiovascular, Immune/Hematopoietic |
| HNKAA76 | B63150 | WO200061629-A1 | Cancer |
| HOABP31 | B63152 | WO200061629-A1 | Cancer |
| HOHBC57 | B63154 | WO200061629-A1 | Cancer |
| HOSCZ41 | B63156 | WO200061629-A1 | Cancer |
| HMVEC89 | B63157 | WO200061629-A1 | Cancer |
| HPJ8J51 | B63162 | WO200061629-A1 | Cancer |
| HGBBR29 | B63164 | WO200061629-A1 | Cancer |
| HPMDD27 | B63165 | WO200061629-A1 | Cancer |
| HPRCM72 | B63169 | WO200061629-A1 | Cancer |
| HPTRM02 | B63171 | WO200061629-A1 | Cancer |
| HPTRW28 | B63172 | WO200061629-A1 | Cancer |
| HRAAZ12 | B63175 | WO200061629-A1 | Cancer |
| HRDEX93 | B63177 | WO200061629-A1 | Cancer |
| HRDFE30 | B63178 | WO200061629-A1 | Cancer |
| HBJHT01 | B63180 | WO200061629-A1 | Immune/Hematopoietic, Reproductive |
| HE8FC45 | B64422 | WO200077255-A1 | Cancer |
| HETCI16 | B64423 | WO200077255-A1 | Cancer |
| HFCBL53 | B64427 | WO200077255-A1 | Cancer |
| HE6GR29 | B64429 | WO200077255-A1 | Cancer |
| HBJEA15 | B64432 | WO200077255-A1 | Cancer |
| HAPNJ33 | B64434 | WO200077255-A1 | Cancer |
| HTXKB57 | B64435 | WO200077255-A1 | Cancer |
| HDLAL94 | B64438 | WO200077255-A1 | Cancer |
| HFVHX08 | B64440 | WO200077255-A1 | Cancer |
| HMVCS92 | B64441 | WO200077255-A1 | Cancer |
| HNEDQ02 | B64443 | WO200077255-A1 | Cancer |
| HPWTF53 | B64450 | WO200077255-A1 | Cancer |
| HRTAP63 | B64451 | WO200077255-A1 | Cancer |
| HASAU26 | B64453 | WO200077255-A1 | Cancer |
| HPWTF23 | B64456 | WO200077255-A1 | Cancer |
| HSLHG78 | B64457 | WO200077255-A1 | Cancer |
| HTNBJ15 | B64461 | WO200077255-A1 | Cancer |
| HTXJW06 | B64463 | WO200077255-A1 | Cancer |
| HUKFV37 | B64466 | WO200077255-A1 | Cancer |
| HWBBU75 | B64468 | WO200077255-A1 | Cancer |
| HWBEF34 | B64469 | WO200077255-A1 | Immune/Hematopoietic, Neural/Sensory |
| HDLAL94 | B64492 | WO200077255-A1 | Cancer |
| HUKFV37 | B64539 | WO200077255-A1 | Cancer |
| HUKFV37 | B64540 | WO200077255-A1 | Cancer |
| HMSGU30 | B64549 | WO200077197-A1 | Cancer |
| HMSHU20 | B64550 | WO200077197-A1 | Immune/Hematopoietic, Reproductive |
| HMTAB77 | B64551 | WO200077197-A1 | Cancer |
| HMUBX48 | B64552 | WO200077197-A1 | Musculoskeletal, Reproductive |
| HMWCG28 | B64553 | WO200077197-A1 | Cancer |
| HMWFO89 | B64555 | WO200077197-A1 | Cancer |
| HMWGM41 | B64556 | WO200077197-A1 | Cancer |
| HMWGV85 | B64557 | WO200077197-A1 | Cancer |
| HNDAC35 | B64558 | WO200077197-A1 | Cancer |
| HNGDN07 | B64559 | WO200077197-A1 | Immune/Hematopoietic, Reproductive |
| HOFMF63 | B64564 | WO200077197-A1 | Cancer |
| HOSEO83 | B64567 | WO200077197-A1 | Cancer |
| HPIAL55 | B64568 | WO200077197-A1 | Cancer |
| HRAAF59 | B64569 | WO200077197-A1 | Excretory |
| HSDIK31 | B64571 | WO200077197-A1 | Cancer |
| HSDJG47 | B64573 | WO200077197-A1 | Cancer |
| HSOAT44 | B64574 | WO200077197-A1 | Cancer |
| HTAEF02 | B64578 | WO200077197-A1 | Immune/Hematopoietic |
| HTLCX82 | B64579 | WO200077197-A1 | Cancer |
| HADDP51 | B64581 | WO200077197-A1 | Cancer |
| HAOAG15 | B64584 | WO200077197-A1 | Cancer |
| HATCS79 | B64585 | WO200077197-A1 | Endocrine, Immune/Hematopoietic |
| HMWGM41 | B64604 | WO200077197-A1 | Cancer |
| HOFMF63 | B64612 | WO200077197-A1 | Cancer |
| HEMBP72 | B64627 | WO200077197-A1 | Cancer |
| HEMBP72 | B64628 | WO200077197-A1 | Cancer |
| HAOAG15 | B64657 | WO200077197-A1 | Cancer |
| HAOAG15 | B64658 | WO200077197-A1 | Cancer |
| HKGDO12 | B64667 | WO200077237-A1 | Cancer |
| HLQAD72 | B64668 | WO200077237-A1 | Cancer |
| HFXHM93 | B64672 | WO200077237-A1 | Neural/Sensory |
| HEBCW57 | B64675 | WO200077237-A1 | Mixed Fetal, Neural/Sensory |
| HAECD28 | B64676 | WO200077237-A1 | Cancer |
| HADXA10 | B64677 | WO200077237-A1 | Cancer |
| HELEL76 | B64678 | WO200077237-A1 | Cancer |
| HETBJ88 | B64680 | WO200077237-A1 | Cancer |
| HETCM67 | B64681 | WO200077237-A1 | Cancer |
| HFCBL53 | B64682 | WO200077237-A1 | Cancer |
| HFEBK75 | B64683 | WO200077237-A1 | Connective/Epithelial |
| HFIIZ61 | B64684 | WO200077237-A1 | Cancer |
| HGBDL51 | B64688 | WO200077237-A1 | Cancer |
| HGLDA95 | B64689 | WO200077237-A1 | Cancer |
| HGLDB06 | B64690 | WO200077237-A1 | Cancer |
| HHBEI14 | B64691 | WO200077237-A1 | Cancer |
| HLDBG17 | B64697 | WO200077237-A1 | Cancer |
| HMCIH27 | B64701 | WO200077237-A1 | Cancer |
| HMEKW71 | B64702 | WO200077237-A1 | Cancer |
| HNGEA90 | B64705 | WO200077237-A1 | Immune/Hematopoietic |
| HNHEN70 | B64708 | WO200077237-A1 | Cancer |
| HOAAH51 | B64711 | WO200077237-A1 | Cancer |
| HORBL77 | B64712 | WO200077237-A1 | Cancer |
| HODAH46 | B64713 | WO200077237-A1 | Cancer |
| HMWEM23 | B64718 | WO200077237-A1 | Cancer |
| HNEBX72 | B64775 | WO200077256-A1 | Immune/Hematopoietic, Neural/Sensory |
| H6EEA48 | B64776 | WO200077256-A1 | Cancer |
| HACBS22 | B64778 | WO200077256-A1 | Cancer |
| HADDP23 | B64779 | WO200077256-A1 | Cancer |
| HAGFD75 | B64782 | WO200077256-A1 | Cancer |
| HAGFS57 | B64783 | WO200077256-A1 | Cancer |
| HAHSD51 | B64785 | WO200077256-A1 | Cancer |
| HANKC93 | B64787 | WO200077256-A1 | Musculoskeletal |
| HAPSH37 | B64789 | WO200077256-A1 | Cancer |
| HATAL05 | B64790 | WO200077256-A1 | Cancer |
| HCBAB34 | B64799 | WO200077256-A1 | Cancer |
| HCE5H86 | B64802 | WO200077256-A1 | Cancer |
| HCEBF54 | B64803 | WO200077256-A1 | Cancer |
| HCEDN07 | B64804 | WO200077256-A1 | Digestive, Mixed Fetal, Neural/Sensory |
| HCEGH74 | B64805 | WO200077256-A1 | Cancer |
| HCELB04 | B64806 | WO200077256-A1 | Cancer |
| HDHEA33 | B64813 | WO200077256-A1 | Cancer |
| HDPIF65 | B64814 | WO200077256-A1 | Immune/Hematopoietic |
| HDPMC52 | B64816 | WO200077256-A1 | Digestive, Immune/Hematopoietic, |
| | | | Musculoskeletal |
| HDSAO14 | B64819 | WO200077256-A1 | Cancer |
| HDTAR39 | B64820 | WO200077256-A1 | Cancer |
| HBXFW01 | B64844 | WO200077256-A1 | Neural/Sensory |
| HLYEJ14 | B64883 | WO200076530-A1 | Cancer |
| HPJCX13 | B64888 | WO200076530-A1 | Cancer |
| HFKEV77 | B64889 | WO200076530-A1 | Cancer |
| HCEOV48 | B64890 | WO200076530-A1 | Cancer |
| HCRMR35 | B64891 | WO200076530-A1 | Cancer |
| HDPNJ26 | B64893 | WO200076530-A1 | Cancer |
| HDQGD06 | B64894 | WO200076530-A1 | Cancer |
| HDQHM36 | B64895 | WO200076530-A1 | Immune/Hematopoietic |
| HFCBL53 | B64901 | WO200076530-A1 | Cancer |
| HIBCO70 | B64905 | WO200076530-A1 | Cancer |
| HLDCR26 | B64908 | WO200076530-A1 | Cancer |
| HLDDM27 | B64909 | WO200076530-A1 | Cancer |
| HMABK52 | B64910 | WO200076530-A1 | Immune/Hematopoietic |
| HNGBC53 | B64915 | WO200076530-A1 | Immune/Hematopoietic |
| HNGJB41 | B64916 | WO200076530-A1 | Immune/Hematopoietic |
| HNHLS76 | B64917 | WO200076530-A1 | Immune/Hematopoietic |
| HSJAQ10 | B64925 | WO200076530-A1 | Cancer |
| HSLDW54 | B64927 | WO200076530-A1 | Cancer |
| HSLFR59 | B64928 | WO200076530-A1 | Cancer |
| HSNAN38 | B64930 | WO200076530-A1 | Cancer |
| HLYEJ14 | B64931 | WO200076530-A1 | Cancer |
| HLYEJ14 | B64932 | WO200076530-A1 | Cancer |
| HPMCV08 | B64993 | WO200075375-A1 | Cancer |
| HFKEM67 | B64994 | WO200075375-A1 | Excretory, Neural/Sensory, Reproductive |
| HDTBW53 | B64996 | WO200075375-A1 | Cancer |
| HFICL62 | B64997 | WO200075375-A1 | Cancer |
| HKAIA52 | B64998 | WO200075375-A1 | Cancer |
| HEGAK44 | B64999 | WO200075375-A1 | Cancer |
| HFXHC85 | B65000 | WO200075375-A1 | Cancer |
| HSXCV85 | B65001 | WO200075375-A1 | Neural/Sensory, Reproductive |
| HPMCU14 | B65002 | WO200075375-A1 | Cancer |
| HYACJ27 | B65003 | WO200075375-A1 | Immune/Hematopoietic |
| HAQBZ15 | B65004 | WO200075375-A1 | Cancer |
| HBIBX03 | B65005 | WO200075375-A1 | Cancer |
| HBMVI06 | B65006 | WO200075375-A1 | Cancer |
| HDPBA28 | B65007 | WO200075375-A1 | Cancer |
| HDPUH26 | B65008 | WO200075375-A1 | Cancer |
| HJTAD07 | B65009 | WO200075375-A1 | Cancer |
| HDPPJ60 | B65010 | WO200075375-A1 | Cancer |
| HLTAU74 | B65011 | WO200075375-A1 | Cancer |
| HCFNN16 | B65012 | WO200075375-A1 | Cancer |
| HCWUI05 | B65013 | WO200075375-A1 | Immune/Hematopoietic |
| HCEBC76 | B65014 | WO200075375-A1 | Neural/Sensory |
| HTEGT82 | B65015 | WO200075375-A1 | Digestive, Reproductive |
| HLHTP35 | B65016 | WO200075375-A1 | Cancer |
| HSYAZ63 | B65017 | WO200075375-A1 | Cancer |
| HLTCR13 | B65018 | WO200075375-A1 | Cancer |
| HPMCV08 | B65019 | WO200075375-A1 | Cancer |
| HEGAK44 | B65021 | WO200075375-A1 | Cancer |
| HEGAK44 | B65022 | WO200075375-A1 | Cancer |
| HSXCV85 | B65024 | WO200075375-A1 | Neural/Sensory, Reproductive |
| HAQBZ15 | B65025 | WO200075375-A1 | Cancer |
| HDPMM34 | R76127 | WO9517092-A | Cancer |
| HAPBR31 | R76128 | WO9517092-A | Cancer |
| HPTXE69 | R76818 | WO9520398-A | Cancer |
| HPTGA39 | R76820 | WO9520398-A | Cancer |
| HFTDJ13 | R81567 | WO9606169-A1 | Cancer |
| HPAAA47 | R88481 | WO9601270-A1 | Cancer |
| HDQAC88 | R93087 | WO9605856-A1 | Cancer |
| HCHBM70 | W06550 | WO9639419-A1 | Cancer |
| HAPBR31 | W07203 | WO9634891-A1 | Cancer |
| HDPMM34 | W07204 | WO9634891-A1 | Cancer |
| HDTAX72 | W07606 | WO9639522-A1 | Cancer |
| HPBCW46 | W09405 | WO9639158-A1 | Mixed Fetal, Neural/Sensory |
| HE9ME29 | W09408 | WO9639486-A1 | Cancer |
| HDTAX72 | W10574 | WO9624668-A1 | Cancer |
| HGCOP28 | W12692 | WO9639424-A1 | Cancer |
| HDQAC88 | W22670 | WO9731098-A1 | Cancer |
| HDPJJ70 | W22732 | WO9724929-A1 | Cancer |
| HSKHZ53 | W23663 | WO9729189-A1 | Cancer |
| HATCY89 | W27087 | WO9725349-A1 | Cancer |
| HNTCF82 | W27224 | WO9735870-A1 | Cardiovascular, Connective/Epithelial, |
| | | | Reproductive |
| HFEBJ25 | W29291 | WO9735010-A1 | Cancer |
| HKMMP34 | W29292 | WO9735010-A1 | Cancer |
| HBMBJ94 | W31527 | WO9737022-A1 | Digestive, Immune/Hematopoietic |
| HDPVA94 | W31902 | WO9737021-A1 | Cancer |
| HFIZF58 | W32110 | WO9738012-A1 | Cancer |
| HSLDE91 | W32112 | WO9734998-A1 | Cancer |
| HDPVA94 | W32323 | WO9736915-A1 | Cancer |
| HETFO52 | W35803 | WO9734997-A1 | Neural/Sensory, Reproductive |
| HETEZ10 | W35804 | WO9734997-A1 | Cancer |
| HBMTO47 | W35904 | WO9738003-A1 | Cancer |
| HDQDX59 | W37002 | WO9733902-A1 | Cancer |
| H2LAJ93 | W37844 | WO9807749-A1 | Cancer |
| HMWIP18 | W37845 | WO9807749-A1 | Cancer |
| HMQDN51 | W37935 | WO9808870-A1 | Cancer |
| HOECW07 | W37946 | WO9821236-A1 | Cancer |
| HTHBJ48 | W41938 | WO9748807-A1 | Digestive, Immune/Hematopoietic |
| HCHBM70 | W46882 | US5733748-A | Cancer |
| HAHSD23 | W48334 | WO9807881-A1 | Cancer |
| HTEHH47 | W48335 | WO9807754-A1 | Cancer |
| HPASD50 | W48391 | WO9807735-A1 | Cancer |
| HDQMC88 | W52842 | WO9807862-A2 | Connective/Epithelial, Immune/Hematopoietic |
| HKACN58 | W53897 | WO9808969-A1 | Cancer |
| HOEAL47 | W57635 | WO9812344-A1 | Cancer |
| HAPBR31 | W57697 | WO9814582-A1 | Cancer |
| HDPMM34 | W57698 | WO9814582-A1 | Cancer |
| HE9ME29 | W58704 | US5780263-A | Cancer |
| HDTAX72 | W58901 | WO9814477-A1 | Cancer |
| HISCH47 | W61621 | WO9831799-A2 | Cancer |
| HDPIR89 | W61622 | WO9831799-A2 | Digestive, Immune/Hematopoietic |
| HAIDQ59 | W61623 | WO9831799-A2 | Cancer |
| HHFEK40 | W61624 | WO9831799-A2 | Cancer |
| HGBGV89 | W61625 | WO9831799-A2 | Digestive |
| HUVBB80 | W61626 | WO9831799-A2 | Cancer |
| HFGAG96 | W61629 | WO9831799-A2 | Cancer |
| HDTEA84 | W63622 | WO9830694-A2 | Cancer |
| HPRCB54 | W64668 | WO9830693-A2 | Cancer |
| HAGFY16 | W67808 | WO9842738-A1 | Cancer |
| HASAV70 | W67811 | WO9842738-A1 | Cancer |
| HBNAF22 | W67812 | WO9842738-A1 | Cancer |
| HCDDR90 | W67814 | WO9842738-A1 | Cancer |
| HCEEF50 | W67815 | WO9842738-A1 | Cardiovascular, Neural/Sensory |
| HCEMU42 | W67816 | WO9842738-A1 | Cancer |
| HCENE16 | W67817 | WO9842738-A1 | Cancer |
| HMSJJ74 | W67818 | WO9842738-A1 | Cancer |
| HCUBF15 | W67819 | WO9842738-A1 | Immune/Hematopoietic |
| HE2DE47 | W67820 | WO9842738-A1 | Cancer |
| HKMLH01 | W67821 | WO9842738-A1 | Cancer |
| HE9DG49 | W67822 | WO9842738-A1 | Cancer |
| HELBA06 | W67823 | WO9842738-A1 | Cancer |
| HSLFM29 | W67824 | WO9842738-A1 | Cancer |
| HELBW38 | W67825 | WO9842738-A1 | Cancer |
| HFEAF41 | W67828 | WO9842738-A1 | Connective/Epithelial, Digestive |
| HFTBE43 | W67831 | WO9842738-A1 | Cancer |
| HLHSV96 | W67835 | WO9842738-A1 | Respiratory |
| HLTBX31 | W67837 | WO9842738-A1 | Cancer |
| HLTCJ63 | W67838 | WO9842738-A1 | Immune/Hematopoietic, Neural/Sensory, |
| | | | Reproductive |
| HMQAJ64 | W67840 | WO9842738-A1 | Connective/Epithelial, Immune/Hematopoietic, |
| | | | Reproductive |
| HOABG65 | W67841 | WO9842738-A1 | Musculoskeletal |
| HODCL36 | W67842 | WO9842738-A1 | Cancer |
| HODCL50 | W67843 | WO9842738-A1 | Reproductive |
| HODCZ16 | W67845 | WO9842738-A1 | Cancer |
| HTOEU03 | W67846 | WO9842738-A1 | Cancer |
| HPBCJ74 | W67847 | WO9842738-A1 | Cancer |
| HSIDQ18 | W67850 | WO9842738-A1 | Cancer |
| HSJBQ79 | W67852 | WO9842738-A1 | Cancer |
| HTEJN13 | W67854 | WO9842738-A1 | Neural/Sensory, Reproductive |
| HTHBL86 | W67855 | WO9842738-A1 | Immune/Hematopoietic |
| HTSFO71 | W67856 | WO9842738-A1 | Cancer |
| HAPNO80 | W67857 | WO9842738-A1 | Cancer |
| HBIBZ09 | W67858 | WO9842738-A1 | Cancer |
| HCFLD84 | W67859 | WO9842738-A1 | Cancer |
| HE8EZ48 | W67861 | WO9842738-A1 | Cancer |
| HEBGF73 | W67862 | WO9842738-A1 | Cancer |
| HFEBF41 | W67863 | WO9842738-A1 | Cancer |
| HFRBU14 | W67864 | WO9842738-A1 | Neural/Sensory |
| HHGCO88 | W67867 | WO9842738-A1 | Cancer |
| HHGDB72 | W67869 | WO9842738-A1 | Cancer |
| HHGDI71 | W67870 | WO9842738-A1 | Excretory |
| HHSDI45 | W67871 | WO9842738-A1 | Cancer |
| HHSEB66 | W67872 | WO9842738-A1 | Cancer |
| HAUAI83 | W67873 | WO9842738-A1 | Reproductive |
| HKDBL30 | W67874 | WO9842738-A1 | Cancer |
| HLDBQ19 | W67875 | WO9842738-A1 | Cancer |
| HMSGT42 | W67876 | WO9842738-A1 | Cancer |
| HMWIC78 | W67877 | WO9842738-A1 | Cancer |
| HMWIR31 | W67878 | WO9842738-A1 | Cancer |
| HNTAC73 | W67880 | WO9842738-A1 | Cancer |
| HOSEI45 | W67881 | WO9842738-A1 | Cancer |
| HOSFD58 | W67882 | WO9842738-A1 | Cancer |
| HSAUM95 | W67883 | WO9842738-A1 | Cancer |
| HSAUR67 | W67884 | WO9842738-A1 | Immune/Hematopoietic |
| HSKDI81 | W67885 | WO9842738-A1 | Cancer |
| HOUFJ08 | W67886 | WO9842738-A1 | Cancer |
| HTLEX50 | W67887 | WO9842738-A1 | Cancer |
| HSKHL65 | W67888 | WO9842738-A1 | Cancer |
| HHFGA11 | W67889 | WO9842738-A1 | Cancer |
| HAQCF47 | W67890 | WO9842738-A1 | Cancer |
| HBXFG80 | W67891 | WO9842738-A1 | Cancer |
| HFLQB16 | W67895 | WO9842738-A1 | Cancer |
| HBMCP89 | W67896 | WO9842738-A1 | Cancer |
| HE6DG34 | W67897 | WO9842738-A1 | Cancer |
| HE9DG49 | W67898 | WO9842738-A1 | Cancer |
| HELBA06 | W67899 | WO9842738-A1 | Cancer |
| HMQAJ64 | W67900 | WO9842738-A1 | Connective/Epithelial, Immune/Hematopoietic, |
| | | | Reproductive |
| HODCL36 | W67901 | WO9842738-A1 | Cancer |
| HODCL36 | W67902 | WO9842738-A1 | Cancer |
| HCMSD80 | W67903 | WO9842738-A1 | Cancer |
| HPBCJ74 | W67904 | WO9842738-A1 | Cancer |
| HHGDU04 | W67905 | WO9842738-A1 | Cancer |
| HTEJN13 | W67907 | WO9842738-A1 | Neural/Sensory, Reproductive |
| HAUCC47 | W67909 | WO9842738-A1 | Cancer |
| HOSFD58 | W67913 | WO9842738-A1 | Cancer |
| HSKHL65 | W67916 | WO9842738-A1 | Cancer |
| HHFGA11 | W67917 | WO9842738-A1 | Cancer |
| HOEBX83 | W67918 | WO9842738-A1 | Cancer |
| HHFGA11 | W67919 | WO9842738-A1 | Cancer |
| HTSFO71 | W67967 | WO9842738-A1 | Cancer |
| HKFBC53 | W68002 | WO9842738-A1 | Cancer |
| HSPBS71 | W69221 | WO9828420-A1 | Connective/Epithelial, Digestive, |
| | | | Immune/Hematopoietic |
| HDPBT77 | W69232 | WO9831806-A2 | Digestive, Immune/Hematopoietic, Reproductive |
| HNFFL83 | W69233 | WO9831806-A2 | Digestive, Immune/Hematopoietic |
| HETHE81 | W71593 | WO9833912-A1 | Cancer |
| HSVBZ80 | W73397 | WO9854206-A1 | Cancer |
| HTAAU21 | W73398 | WO9854206-A1 | Cancer |
| HUSIR91 | W73400 | WO9854206-A1 | Cancer |
| HADMC21 | W73401 | WO9854206-A1 | Cancer |
| HAGFM45 | W73402 | WO9854206-A1 | Cancer |
| HAIBE65 | W73403 | WO9854206-A1 | Cancer |
| HAQBH57 | W73404 | WO9854206-A1 | Cancer |
| HATCX80 | W73405 | WO9854206-A1 | Cancer |
| HLDOT61 | W73408 | WO9854206-A1 | Cancer |
| HEMCM42 | W73409 | WO9854206-A1 | Cancer |
| HFCDW34 | W73411 | WO9854206-A1 | Cancer |
| HTTEU91 | W73412 | WO9854206-A1 | Cancer |
| HHGBF89 | W73413 | WO9854206-A1 | Mixed Fetal |
| HKMLN27 | W73415 | WO9854206-A1 | Cancer |
| HLYAZ61 | W73419 | WO9854206-A1 | Immune/Hematopoietic |
| HMQDT36 | W73420 | WO9854206-A1 | Cancer |
| HETFI51 | W73428 | WO9854206-A1 | Cancer |
| HUSIR91 | W73429 | WO9854206-A1 | Cancer |
| HHGBF89 | W73430 | WO9854206-A1 | Mixed Fetal |
| HPWBA10 | W73432 | WO9854206-A1 | Immune/Hematopoietic, Reproductive |
| HPMBQ91 | W74413 | EP892053-A2 | Reproductive |
| HBGBW52 | W74732 | WO9839448-A2 | Cancer |
| HCUFQ22 | W74734 | WO9839448-A2 | Immune/Hematopoietic |
| HLDOU93 | W74738 | WO9839448-A2 | Digestive, Musculoskeletal, Reproductive |
| HNGJJ68 | W74741 | WO9839448-A2 | Cancer |
| HCFAW04 | W74742 | WO9839448-A2 | Immune/Hematopoietic |
| HLMAV65 | W74743 | WO9839448-A2 | Cancer |
| HPMFD84 | W74744 | WO9839448-A2 | Cancer |
| HE6DB26 | W74745 | WO9839448-A2 | Cancer |
| HODBD33 | W74747 | WO9839448-A2 | Reproductive |
| HBJAE44 | W74750 | WO9839448-A2 | Immune/Hematopoietic |
| HCFME41 | W74751 | WO9839448-A2 | Cancer |
| HOGCO71 | W74752 | WO9839448-A2 | Cancer |
| HOSEX08 | W74753 | WO9839448-A2 | Cancer |
| HSKNJ72 | W74754 | WO9839448-A2 | Digestive, Musculoskeletal |
| HEBEB69 | W74755 | WO9839448-A2 | Neural/Sensory, Reproductive |
| HE6EH18 | W74756 | WO9839448-A2 | Mixed Fetal, Neural/Sensory |
| HSSDM73 | W74758 | WO9839448-A2 | Musculoskeletal, Neural/Sensory, Reproductive |
| HMKCU94 | W74761 | WO9839448-A2 | Cancer |
| HRDEW41 | W74762 | WO9839448-A2 | Cancer |
| HBGDA21 | W74764 | WO9839448-A2 | Cancer |
| HFGAK75 | W74765 | WO9839448-A2 | Cancer |
| HFSAU96 | W74766 | WO9839448-A2 | Cancer |
| HOVCL83 | W74767 | WO9839448-A2 | Cancer |
| HBICM48 | W74769 | WO9839448-A2 | Cancer |
| HLTCL35 | W74770 | WO9839448-A2 | Cancer |
| HRSAN45 | W74771 | WO9839448-A2 | Cancer |
| HSNBB14 | W74772 | WO9839448-A2 | Cancer |
| HMABL38 | W74773 | WO9839448-A2 | Cancer |
| HSKDK47 | W74774 | WO9839448-A2 | Cancer |
| HOSFH03 | W74775 | WO9839448-A2 | Cancer |
| HOGAV75 | W74776 | WO9839448-A2 | Cancer |
| HBXDO23 | W74777 | WO9839448-A2 | Cancer |
| HAGBI17 | W74778 | WO9839448-A2 | Cancer |
| HPRCA31 | W74780 | WO9839448-A2 | Cancer |
| HPRCE95 | W74781 | WO9839448-A2 | Cancer |
| HHTLC66 | W74782 | WO9839448-A2 | Cancer |
| HMADJ02 | W74783 | WO9839448-A2 | Cancer |
| HPRCU93 | W74784 | WO9839448-A2 | Cancer |
| HSAXS65 | W74785 | WO9839448-A2 | Cancer |
| HHFHN61 | W74787 | WO9839448-A2 | Cancer |
| HCWEF90 | W74788 | WO9839448-A2 | Cancer |
| HFRAU10 | W74790 | WO9839448-A2 | Neural/Sensory |
| HATDT67 | W74791 | WO9839448-A2 | Cancer |
| HOUBG93 | W74792 | WO9839448-A2 | Cancer |
| HMWEX24 | W74793 | WO9839448-A2 | Cancer |
| HTOCD52 | W74795 | WO9839448-A2 | Digestive, Immune/Hematopoietic, Reproductive |
| HTGCP16 | W74796 | WO9839448-A2 | Cancer |
| HKIXR69 | W74797 | WO9839448-A2 | Cancer |
| HE6CN34 | W74800 | WO9839448-A2 | Cancer |
| HSQEL25 | W74802 | WO9839448-A2 | Cancer |
| HEBEG68 | W74803 | WO9839448-A2 | Cancer |
| HBIAB39 | W74804 | WO9839448-A2 | Cancer |
| HOEAS24 | W74805 | WO9839448-A2 | Cancer |
| HETDD75 | W74806 | WO9839448-A2 | Cancer |
| HSKNE46 | W74807 | WO9839448-A2 | Cancer |
| HPMFL27 | W74808 | WO9839448-A2 | Cancer |
| HPRAX55 | W74810 | WO9839448-A2 | Cancer |
| HE2PL77 | W74812 | WO9839448-A2 | Cancer |
| HLHAU92 | W74813 | WO9839448-A2 | Cancer |
| HTPEG42 | W74814 | WO9839448-A2 | Cancer |
| HAUAV32 | W74816 | WO9839448-A2 | Cancer |
| HNEBI60 | W74817 | WO9839448-A2 | Cancer |
| HTSEL31 | W74819 | WO9839448-A2 | Cancer |
| HAUBL57 | W74820 | WO9839448-A2 | Cancer |
| HE6CT48 | W74822 | WO9839448-A2 | Digestive, Mixed Fetal |
| HMDAA61 | W74823 | WO9839448-A2 | Cancer |
| HAQBK61 | W74824 | WO9839448-A2 | Cancer |
| HAQBF73 | W74825 | WO9839448-A2 | Cancer |
| HAQBT94 | W74826 | WO9839448-A2 | Cancer |
| HLQAB52 | W74828 | WO9839448-A2 | Cancer |
| HE2BG03 | W74830 | WO9839448-A2 | Cancer |
| HCUBC79 | W74832 | WO9839448-A2 | Cancer |
| HSVAF07 | W74833 | WO9839448-A2 | Cancer |
| HT3AM65 | W74834 | WO9839448-A2 | Cancer |
| HE6DK18 | W74835 | WO9839448-A2 | Cancer |
| HEBEK93 | W74836 | WO9839448-A2 | Cancer |
| HJPCM10 | W74837 | WO9839448-A2 | Cancer |
| HSXBL78 | W74838 | WO9839448-A2 | Cancer |
| HOEAW81 | W74839 | WO9839448-A2 | Cancer |
| HEAAR60 | W74841 | WO9839448-A2 | Cancer |
| HOVBA03 | W74843 | WO9839448-A2 | Cancer |
| HGBGK76 | W74844 | WO9839448-A2 | Digestive, Neural/Sensory |
| HBMUW78 | W74845 | WO9839448-A2 | Cancer |
| HATCM76 | W74848 | WO9839448-A2 | Cancer |
| H6EBJ64 | W74849 | WO9839448-A2 | Cancer |
| HDDAD77 | W74850 | WO9839448-A2 | Cancer |
| HSPAG15 | W74853 | WO9839448-A2 | Cancer |
| HUSHH48 | W74855 | WO9839448-A2 | Cancer |
| HHSCV65 | W74857 | WO9839448-A2 | Cancer |
| HHSDQ41 | W74858 | WO9839448-A2 | Cancer |
| HEBFU93 | W74860 | WO9839448-A2 | Excretory, Neural/Sensory, Reproductive |
| HSGSC60 | W74861 | WO9839448-A2 | Cancer |
| HPMGD24 | W74862 | WO9839448-A2 | Cancer |
| HPTVC60 | W74863 | WO9839448-A2 | Cancer |
| HSKNE18 | W74864 | WO9839448-A2 | Cancer |
| HMWIF35 | W74865 | WO9839448-A2 | Cancer |
| HMWGI25 | W74866 | WO9839448-A2 | Cancer |
| HSKGF03 | W74867 | WO9839448-A2 | Cancer |
| HMSKE75 | W74868 | WO9839448-A2 | Cancer |
| HCMSH30 | W74869 | WO9839448-A2 | Cancer |
| HTWCB92 | W74870 | WO9839448-A2 | Cancer |
| HBMDM46 | W74871 | WO9839448-A2 | Cancer |
| HFXHL79 | W74873 | WO9839448-A2 | Cancer |
| HBJFJ73 | W74874 | WO9839448-A2 | Cancer |
| HSJAP03 | W74875 | WO9839448-A2 | Cancer |
| H6EAD09 | W74876 | WO9839448-A2 | Cancer |
| HTLEF62 | W74879 | WO9839448-A2 | Cancer |
| HTLAD94 | W74880 | WO9839448-A2 | Cancer |
| HTSFQ12 | W74881 | WO9839448-A2 | Cancer |
| HCE2K05 | W74882 | WO9839448-A2 | Cancer |
| HLTED27 | W74884 | WO9839448-A2 | Cancer |
| HMKBA64 | W74885 | WO9839448-A2 | Cancer |
| HNFCO49 | W74886 | WO9839448-A2 | Cancer |
| HCELB21 | W74887 | WO9839448-A2 | Cancer |
| HSAAS44 | W74889 | WO9839448-A2 | Cancer |
| HAFAL73 | W74890 | WO9839448-A2 | Cancer |
| HSAWF26 | W74891 | WO9839448-A2 | Digestive, Immune/Hematopoietic, |
| | | | Musculoskeletal |
| HMQDN51 | W74892 | WO9839448-A2 | Cancer |
| H2LAO11 | W74894 | WO9839448-A2 | Cancer |
| HPTTU11 | W74896 | WO9839448-A2 | Cancer |
| HTEDJ34 | W74898 | WO9839448-A2 | Cancer |
| HFTAR26 | W74900 | WO9839448-A2 | Cancer |
| H2MBF44 | W74901 | WO9839448-A2 | Cancer |
| HE8BI92 | W74902 | WO9839448-A2 | Cancer |
| HFTBR48 | W74903 | WO9839448-A2 | Cancer |
| HE9CM64 | W74904 | WO9839448-A2 | Cancer |
| HATAV51 | W74905 | WO9839448-A2 | Cancer |
| HCEEK08 | W74907 | WO9839448-A2 | Cancer |
| HAFAU18 | W74908 | WO9839448-A2 | Cancer |
| HETBY74 | W74909 | WO9839448-A2 | Cancer |
| HTOAF35 | W74910 | WO9839448-A2 | Cancer |
| HCRBX32 | W74911 | WO9839448-A2 | Cancer |
| HEBGB80 | W74912 | WO9839448-A2 | Cancer |
| HFAMH74 | W74913 | WO9839448-A2 | Cancer |
| HLMAV65 | W74920 | WO9839448-A2 | Cancer |
| HMAGF23 | W74922 | WO9839448-A2 | Cancer |
| HE6EH18 | W74929 | WO9839448-A2 | Mixed Fetal, Neural/Sensory |
| HMKCU94 | W74930 | WO9839448-A2 | Cancer |
| HBGDA21 | W74931 | WO9839448-A2 | Cancer |
| HFKFN58 | W74932 | WO9839448-A2 | Cancer |
| HSNBB14 | W74935 | WO9839448-A2 | Cancer |
| HOSFH03 | W74937 | WO9839448-A2 | Cancer |
| HAGBI17 | W74939 | WO9839448-A2 | Cancer |
| HPRCA31 | W74940 | WO9839448-A2 | Cancer |
| HPRCU93 | W74943 | WO9839448-A2 | Cancer |
| HPDDK44 | W74944 | WO9839448-A2 | Cancer |
| HCWEF90 | W74946 | WO9839448-A2 | Cancer |
| HFRAU10 | W74947 | WO9839448-A2 | Neural/Sensory |
| HBIAB39 | W74953 | WO9839448-A2 | Cancer |
| HBIAB39 | W74954 | WO9839448-A2 | Cancer |
| HOEAS24 | W74955 | WO9839448-A2 | Cancer |
| HOEAS24 | W74956 | WO9839448-A2 | Cancer |
| HPRAX55 | W74958 | WO9839448-A2 | Cancer |
| HTPEG42 | W74960 | WO9839448-A2 | Cancer |
| HAUAV32 | W74961 | WO9839448-A2 | Cancer |
| HNEBI60 | W74962 | WO9839448-A2 | Cancer |
| HAUBL57 | W74963 | WO9839448-A2 | Cancer |
| HAUBL57 | W74964 | WO9839448-A2 | Cancer |
| HE6CT48 | W74965 | WO9839448-A2 | Digestive, Mixed Fetal |
| HMDAA61 | W74966 | WO9839448-A2 | Cancer |
| HAQBK61 | W74967 | WO9839448-A2 | Cancer |
| HCUHB01 | W74968 | WO9839448-A2 | Cancer |
| HETHE07 | W74970 | WO9839448-A2 | Cancer |
| HETHE07 | W74971 | WO9839448-A2 | Cancer |
| HLQAB52 | W74972 | WO9839448-A2 | Cancer |
| HEONN58 | W74973 | WO9839448-A2 | Cancer |
| HIBEK16 | W74974 | WO9839448-A2 | Cancer |
| HE2BG03 | W74975 | WO9839448-A2 | Cancer |
| HCUBC79 | W74976 | WO9839448-A2 | Cancer |
| HSVAF07 | W74978 | WO9839448-A2 | Cancer |
| HSVAF07 | W74979 | WO9839448-A2 | Cancer |
| HT3AM65 | W74980 | WO9839448-A2 | Cancer |
| HT3AM65 | W74981 | WO9839448-A2 | Cancer |
| HJPCM10 | W74983 | WO9839448-A2 | Cancer |
| HJPCM10 | W74984 | WO9839448-A2 | Cancer |
| HOVBA03 | W74987 | WO9839448-A2 | Cancer |
| H6EBJ64 | W74990 | WO9839448-A2 | Cancer |
| HUSHH48 | W74991 | WO9839448-A2 | Cancer |
| HEBFU93 | W74992 | WO9839448-A2 | Excretory, Neural/Sensory, Reproductive |
| HPTVC60 | W74993 | WO9839448-A2 | Cancer |
| HMWIF35 | W74995 | WO9839448-A2 | Cancer |
| HSKGF03 | W74996 | WO9839448-A2 | Cancer |
| HBJFJ73 | W75000 | WO9839448-A2 | Cancer |
| HCFBC03 | W75001 | WO9839448-A2 | Cancer |
| HSJAP03 | W75002 | WO9839448-A2 | Cancer |
| HE6FL83 | W75005 | WO9839448-A2 | Cancer |
| HPTTU11 | W75013 | WO9839448-A2 | Cancer |
| H2MBF44 | W75015 | WO9839448-A2 | Cancer |
| HE9CM64 | W75018 | WO9839448-A2 | Cancer |
| HAFAU18 | W75021 | WO9839448-A2 | Cancer |
| HSHCC16 | W75050 | WO9839448-A2 | Cancer |
| HGCMD20 | W75057 | WO9839446-A2 | Cancer |
| HLDBG33 | W75058 | WO9839446-A2 | Cancer |
| HLHEJ14 | W75059 | WO9839446-A2 | Cancer |
| HKCSR70 | W75060 | WO9839446-A2 | Cancer |
| HBMCY91 | W75062 | WO9839446-A2 | Immune/Hematopoietic |
| HSSGE07 | W75063 | WO9839446-A2 | Cancer |
| HBMBX59 | W75064 | WO9839446-A2 | Immune/Hematopoietic, Reproductive |
| HNGIT22 | W75065 | WO9839446-A2 | Immune/Hematopoietic |
| HERAD57 | W75066 | WO9839446-A2 | Connective/Epithelial |
| HCENJ40 | W75067 | WO9839446-A2 | Cancer |
| HCSRA90 | W75068 | WO9839446-A2 | Cardiovascular, Musculoskeletal |
| HBJFC03 | W75069 | WO9839446-A2 | Immune/Hematopoietic |
| HTEBY26 | W75071 | WO9839446-A2 | Cancer |
| HMABH07 | W75072 | WO9839446-A2 | Cancer |
| HSKNY94 | W75073 | WO9839446-A2 | Cancer |
| HMCDA67 | W75074 | WO9839446-A2 | Immune/Hematopoietic |
| HOSFF45 | W75075 | WO9839446-A2 | Cancer |
| HMJAA51 | W75076 | WO9839446-A2 | Cancer |
| HTEBF05 | W75077 | WO9839446-A2 | Reproductive |
| HTEAL31 | W75078 | WO9839446-A2 | Cancer |
| HSKXE91 | W75080 | WO9839446-A2 | Cancer |
| HPWTB39 | W75081 | WO9839446-A2 | Mixed Fetal, Reproductive |
| HTLEV12 | W75082 | WO9839446-A2 | Reproductive |
| HSPAF93 | W75083 | WO9839446-A2 | Digestive |
| HHFGL62 | W75084 | WO9839446-A2 | Cardiovascular |
| HCE1U14 | W75085 | WO9839446-A2 | Cancer |
| HTHBA79 | W75087 | WO9839446-A2 | Cancer |
| HAGBB70 | W75088 | WO9839446-A2 | Cancer |
| HETDG84 | W75089 | WO9839446-A2 | Cancer |
| HTEGA81 | W75090 | WO9839446-A2 | Cancer |
| HTXAK60 | W75091 | WO9839446-A2 | Cancer |
| HMHBN40 | W75092 | WO9839446-A2 | Cancer |
| HFVGS85 | W75093 | WO9839446-A2 | Cancer |
| HERAH81 | W75094 | WO9839446-A2 | Cancer |
| HMSEU04 | W75095 | WO9839446-A2 | Cancer |
| HNEDJ57 | W75096 | WO9839446-A2 | Cancer |
| HNTME13 | W75097 | WO9839446-A2 | Cancer |
| HSXBI25 | W75098 | WO9839446-A2 | Cancer |
| HSXCK41 | W75099 | WO9839446-A2 | Cancer |
| HE8CJ26 | W75100 | WO9839446-A2 | Cancer |
| HTTDS54 | W75101 | WO9839446-A2 | Cancer |
| HHFCW44 | W75102 | WO9839446-A2 | Cancer |
| HMCBP63 | W75103 | WO9839446-A2 | Cancer |
| HEMGE83 | W75104 | WO9839446-A2 | Cancer |
| HHSDC22 | W75105 | WO9839446-A2 | Digestive, Neural/Sensory |
| HHSDZ57 | W75106 | WO9839446-A2 | Cancer |
| HCRBS80 | W75107 | WO9839446-A2 | Cancer |
| HMMAB12 | W75108 | WO9839446-A2 | Immune/Hematopoietic, Neural/Sensory |
| HSKDW02 | W75109 | WO9839446-A2 | Cancer |
| HWHHL34 | W75110 | WO9839446-A2 | Cancer |
| HODAZ50 | W75111 | WO9839446-A2 | Reproductive |
| HCEWC82 | W75112 | WO9839446-A2 | Cancer |
| HE6ES13 | W75113 | WO9839446-A2 | Cancer |
| HSSEP68 | W75114 | WO9839446-A2 | Cancer |
| HRDEV41 | W75115 | WO9839446-A2 | Cancer |
| HILCJ01 | W75116 | WO9839446-A2 | Cancer |
| HSATP28 | W75117 | WO9839446-A2 | Cancer |
| HBJEM49 | W75119 | WO9839446-A2 | Cancer |
| HSLDJ95 | W75120 | WO9839446-A2 | Cancer, Immune |
| HSREG44 | W75121 | WO9839446-A2 | Cancer |
| HTXCT40 | W75122 | WO9839446-A2 | Cancer |
| HRGDF73 | W75123 | WO9839446-A2 | Cancer |
| HKMND45 | W75124 | WO9839446-A2 | Cancer |
| HPEBD70 | W75125 | WO9839446-A2 | Cancer |
| HLMDX11 | W75126 | WO9839446-A2 | Cancer |
| HKCSR70 | W75128 | WO9839446-A2 | Cancer |
| HETBI87 | W75129 | WO9839446-A2 | Reproductive |
| HSSGE07 | W75130 | WO9839446-A2 | Cancer |
| HCENJ40 | W75132 | WO9839446-A2 | Cancer |
| HSNBL85 | W75135 | WO9839446-A2 | Cancer |
| HMAAD57 | W75137 | WO9839446-A2 | Cancer |
| HMAAD57 | W75138 | WO9839446-A2 | Cancer |
| HSKNY94 | W75139 | WO9839446-A2 | Cancer |
| HOSFF45 | W75140 | WO9839446-A2 | Cancer |
| HMJAA51 | W75141 | WO9839446-A2 | Cancer |
| HTEAL31 | W75142 | WO9839446-A2 | Cancer |
| HSPAF93 | W75145 | WO9839446-A2 | Digestive |
| HHFGL62 | W75146 | WO9839446-A2 | Cardiovascular |
| HTHBA79 | W75148 | WO9839446-A2 | Cancer |
| HTEGA81 | W75151 | WO9839446-A2 | Cancer |
| HTEGA81 | W75152 | WO9839446-A2 | Cancer |
| HMHBN40 | W75154 | WO9839446-A2 | Cancer |
| HLHDL62 | W75155 | WO9839446-A2 | Cancer |
| HSXBI25 | W75156 | WO9839446-A2 | Cancer |
| HSXCK41 | W75157 | WO9839446-A2 | Cancer |
| HTTDS54 | W75159 | WO9839446-A2 | Cancer |
| HHFCW44 | W75160 | WO9839446-A2 | Cancer |
| HHSDZ57 | W75161 | WO9839446-A2 | Cancer |
| HAICS58 | W75162 | WO9839446-A2 | Cancer |
| HAICS58 | W75163 | WO9839446-A2 | Cancer |
| HSKDW02 | W75165 | WO9839446-A2 | Cancer |
| HETGL41 | W75166 | WO9839446-A2 | Cancer |
| HODAZ50 | W75167 | WO9839446-A2 | Reproductive |
| HE6ES13 | W75168 | WO9839446-A2 | Cancer |
| HSSEP68 | W75169 | WO9839446-A2 | Cancer |
| HRDEV41 | W75171 | WO9839446-A2 | Cancer |
| HHFGL41 | W75172 | WO9839446-A2 | Cancer |
| HBJEM49 | W75173 | WO9839446-A2 | Cancer |
| HFTAK35 | W75174 | WO9839446-A2 | Cancer |
| HTXCT40 | W75175 | WO9839446-A2 | Cancer |
| HRDBF52 | W75176 | WO9839446-A2 | Cancer |
| HKMND45 | W75177 | WO9839446-A2 | Cancer |
| HDTBJ30 | W75178 | WO9839446-A2 | Cancer |
| HLMDX11 | W75179 | WO9839446-A2 | Cancer |
| HCEAB46 | W75196 | WO9840483-A2 | Cancer |
| HCEDH81 | W75197 | WO9840483-A2 | Cancer |
| HELDY41 | W75200 | WO9840483-A2 | Cancer |
| HETDM20 | W75201 | WO9840483-A2 | Cancer |
| HE2DX30 | W75202 | WO9840483-A2 | Cancer |
| HJBCD89 | W75204 | WO9840483-A2 | Cancer |
| HJTAA17 | W75205 | WO9840483-A2 | Cancer |
| HLTBS22 | W75206 | WO9840483-A2 | Cancer |
| HNFCV70 | W75208 | WO9840483-A2 | Cancer |
| HNFGF45 | W75210 | WO9840483-A2 | Cancer |
| HOVAB12 | W75211 | WO9840483-A2 | Cancer |
| HPMBQ91 | W75212 | WO9840483-A2 | Reproductive |
| HRSMC69 | W75214 | WO9840483-A2 | Cancer |
| HSQFP46 | W75216 | WO9840483-A2 | Cancer |
| HTEAE62 | W75218 | WO9840483-A2 | Cardiovascular, Reproductive |
| HTEBY11 | W75219 | WO9840483-A2 | Reproductive |
| HTEEB42 | W75220 | WO9840483-A2 | Cancer |
| HTPBY11 | W75221 | WO9840483-A2 | Cancer |
| HCEDH81 | W75224 | WO9840483-A2 | Cancer |
| HJBCD89 | W75226 | WO9840483-A2 | Cancer |
| HNFCV70 | W75227 | WO9840483-A2 | Cancer |
| HPMBQ91 | W75228 | WO9840483-A2 | Reproductive |
| HBMSH54 | W75231 | WO9840483-A2 | Cancer |
| HSDEG01 | W75232 | WO9840483-A2 | Cancer |
| HSQFP46 | W75233 | WO9840483-A2 | Cancer |
| HTEBY11 | W75234 | WO9840483-A2 | Reproductive |
| HYACC84 | W75245 | WO9840483-A2 | Cancer |
| HETAG43 | W76253 | WO9831818-A2 | Digestive, Reproductive |
| HOSBI96 | W78128 | WO9856804-A1 | Cancer |
| HPDDC77 | W78131 | WO9856804-A1 | Cancer |
| HPEBD85 | W78132 | WO9856804-A1 | Digestive, Reproductive |
| HPMGQ80 | W78135 | WO9856804-A1 | Cancer |
| HSDES04 | W78140 | WO9856804-A1 | Cancer |
| HSHBQ68 | W78141 | WO9856804-A1 | Cancer |
| HSKBO20 | W78142 | WO9856804-A1 | Cancer |
| HSKZE52 | W78145 | WO9856804-A1 | Cancer |
| HWTAZ75 | W78146 | WO9856804-A1 | Cancer |
| HSVAG05 | W78148 | WO9856804-A1 | Cancer |
| HSVBF78 | W78149 | WO9856804-A1 | Cancer |
| HSXBO51 | W78150 | WO9856804-A1 | Cancer |
| HT4AI54 | W78152 | WO9856804-A1 | Cancer |
| HTEHU93 | W78153 | WO9856804-A1 | Reproductive |
| HMSDG61 | W78154 | WO9856804-A1 | Cancer |
| HTLDQ11 | W78157 | WO9856804-A1 | Reproductive |
| HTOBX52 | W78158 | WO9856804-A1 | Cancer |
| HTTCN24 | W78159 | WO9856804-A1 | Cancer |
| HTXCS21 | W78160 | WO9856804-A1 | Cancer |
| HBMBB80 | W78164 | WO9856804-A1 | Digestive, Immune/Hematopoietic |
| HSXBP68 | W78166 | WO9856804-A1 | Cancer |
| HFFAT33 | W78167 | WO9856804-A1 | Cancer |
| HFGAG96 | W78168 | WO9856804-A1 | Cancer |
| HETFJ05 | W78169 | WO9856804-A1 | Cancer |
| HE8BX01 | W78170 | WO9856804-A1 | Cancer |
| HMSJU68 | W78171 | WO9856804-A1 | Cancer |
| HOSCZ41 | W78172 | WO9856804-A1 | Cancer |
| HSQEA85 | W78174 | WO9856804-A1 | Cancer |
| HSTAG52 | W78175 | WO9856804-A1 | Cancer |
| HBXGP76 | W78177 | WO9856804-A1 | Immune/Hematopoietic, Neural/Sensory |
| HE6GL64 | W78178 | WO9856804-A1 | Cardiovascular, Immune/Hematopoietic, Mixed |
| | | | Fetal |
| HESAL35 | W78179 | WO9856804-A1 | Connective/Epithelial, Mixed Fetal |
| HNHAL34 | W78183 | WO9856804-A1 | Cancer |
| HOSFF78 | W78184 | WO9856804-A1 | Cancer |
| HPMCC16 | W78188 | WO9856804-A1 | Cancer |
| HOUCQ17 | W78189 | WO9856804-A1 | Cancer |
| HTOFC34 | W78192 | WO9856804-A1 | Cancer |
| H2CBJ08 | W78193 | WO9856804-A1 | Cancer |
| HAGFT48 | W78194 | WO9856804-A1 | Cancer |
| HCE5M29 | W78195 | WO9856804-A1 | Cancer |
| HCFNN01 | W78197 | WO9856804-A1 | Digestive, Immune/Hematopoietic, Neural/Sensory |
| HE7TF86 | W78198 | WO9856804-A1 | Cancer |
| HHGAU81 | W78200 | WO9856804-A1 | Cancer |
| HPTRF90 | W78206 | WO9856804-A1 | Cancer |
| HSRDH01 | W78207 | WO9856804-A1 | Cancer |
| HSAWD74 | W78208 | WO9856804-A1 | Cancer |
| HTEJO12 | W78209 | WO9856804-A1 | Digestive, Reproductive |
| HTLAB43 | W78210 | WO9856804-A1 | Cancer |
| HTWCT03 | W78211 | WO9856804-A1 | Immune/Hematopoietic |
| HSDES04 | W78213 | WO9856804-A1 | Cancer |
| HT3BE24 | W78214 | WO9856804-A1 | Cancer |
| HTTCN24 | W78216 | WO9856804-A1 | Cancer |
| HCRAZ77 | W78221 | WO9856804-A1 | Cancer |
| HFGAG96 | W78222 | WO9856804-A1 | Cancer |
| HADTN61 | W78223 | WO9856804-A1 | Cancer |
| HLYBF81 | W78224 | WO9856804-A1 | Cancer |
| HSTBE27 | W78225 | WO9856804-A1 | Cancer |
| HMSDG61 | W78263 | WO9856804-A1 | Cancer |
| HTOBX52 | W78274 | WO9856804-A1 | Cancer |
| HFGAG96 | W78295 | WO9856804-A1 | Cancer |
| HCE5M29 | W78316 | WO9856804-A1 | Cancer |
| HLCAA05 | W78321 | WO9856804-A1 | Cancer |
| HTLEF68 | W78326 | WO9856804-A1 | Cancer |
| HSJAR34 | W79739 | WO9846746-A1 | Cancer |
| HOUCQ17 | W80285 | EP874050-A2 | Cancer |
| HCWHZ93 | W83931 | WO9845712-A2 | Immune/Hematopoietic, Neural/Sensory |
| HE2FV03 | W83933 | WO9845712-A2 | Cancer |
| HCDAG36 | W83934 | WO9845712-A2 | Cancer |
| HMQBU44 | W83935 | WO9845712-A2 | Cancer |
| HLHCM89 | W83938 | WO9845712-A2 | Cancer |
| HLHEF26 | W83939 | WO9845712-A2 | Cancer |
| HLHEO50 | W83940 | WO9845712-A2 | Cancer |
| HDSAE10 | W83941 | WO9845712-A2 | Cancer |
| HSKNK73 | W83942 | WO9845712-A2 | Cancer |
| HSSMS41 | W83943 | WO9845712-A2 | Cancer |
| HNGBV36 | W83944 | WO9845712-A2 | Cancer |
| HNGDE27 | W83945 | WO9845712-A2 | Immune/Hematopoietic |
| HPFDU90 | W83947 | WO9845712-A2 | Cancer |
| HRLMD77 | W83948 | WO9845712-A2 | Cancer |
| HRLMF92 | W83949 | WO9845712-A2 | Cancer |
| HLHDZ58 | W88535 | WO9854963-A2 | Respiratory |
| HLMMJ13 | W88536 | WO9854963-A2 | Immune/Hematopoietic, Musculoskeletal, |
| | | | Reproductive |
| HNFED65 | W88539 | WO9854963-A2 | Excretory, Immune/Hematopoietic |
| HNHDX07 | W88540 | WO9854963-A2 | Immune/Hematopoietic |
| HNHGC82 | W88541 | WO9854963-A2 | Immune/Hematopoietic |
| HNHGO09 | W88542 | WO9854963-A2 | Immune/Hematopoietic |
| HOUBE18 | W88543 | WO9854963-A2 | Cancer |
| HOUDL69 | W88544 | WO9854963-A2 | Cancer |
| HPMFI71 | W88545 | WO9854963-A2 | Cancer |
| HPTBB03 | W88548 | WO9854963-A2 | Cancer |
| HPTWA66 | W88549 | WO9854963-A2 | Cancer |
| HPTWC08 | W88550 | WO9854963-A2 | Cancer |
| HRGCZ46 | W88551 | WO9854963-A2 | Cancer |
| HSAVU34 | W88552 | WO9854963-A2 | Cancer |
| HSDFW61 | W88553 | WO9854963-A2 | Cancer |
| HSQEO84 | W88556 | WO9854963-A2 | Cancer |
| HSXAM05 | W88557 | WO9854963-A2 | Cancer |
| HSXAS67 | W88558 | WO9854963-A2 | Neural/Sensory |
| HTDAF28 | W88559 | WO9854963-A2 | Cancer |
| HTOAM21 | W88562 | WO9854963-A2 | Immune/Hematopoietic |
| HETCH46 | W88563 | WO9854963-A2 | Cancer |
| HJPCD40 | W88564 | WO9854963-A2 | Cancer |
| HTWBY48 | W88565 | WO9854963-A2 | Immune/Hematopoietic |
| HWTBF59 | W88568 | WO9854963-A2 | Cancer |
| HAGFB60 | W88570 | WO9854963-A2 | Neural/Sensory |
| HATEF60 | W88571 | WO9854963-A2 | Cancer |
| HCDAR68 | W88573 | WO9854963-A2 | Cancer |
| HMDAN54 | W88575 | WO9854963-A2 | Immune/Hematopoietic, Neural/Sensory |
| HCEEC15 | W88577 | WO9854963-A2 | Cancer |
| HCESF40 | W88578 | WO9854963-A2 | Immune/Hematopoietic, Neural/Sensory |
| HCFMV39 | W88579 | WO9854963-A2 | Cancer |
| HCNAP62 | W88581 | WO9854963-A2 | Cancer |
| HCUDC07 | W88583 | WO9854963-A2 | Immune/Hematopoietic |
| HCWBB42 | W88584 | WO9854963-A2 | Immune/Hematopoietic |
| HE9ND48 | W88592 | WO9854963-A2 | Mixed Fetal |
| HEBBW11 | W88593 | WO9854963-A2 | Cancer |
| HEMAE80 | W88595 | WO9854963-A2 | Cardiovascular, Musculoskeletal, Reproductive |
| HFEBA88 | W88596 | WO9854963-A2 | Cancer |
| HGBAJ93 | W88599 | WO9854963-A2 | Cancer |
| HGBBQ69 | W88600 | WO9854963-A2 | Cancer |
| HHFHJ59 | W88602 | WO9854963-A2 | Cancer |
| HHPFD63 | W88606 | WO9854963-A2 | Endocrine, Immune/Hematopoietic, |
| | | | Neural/Sensory |
| HHSEG23 | W88607 | WO9854963-A2 | Neural/Sensory |
| HKIXL73 | W88609 | WO9854963-A2 | Cancer |
| HKMNC43 | W88610 | WO9854963-A2 | Excretory |
| HMEJE31 | W88611 | WO9854963-A2 | Cardiovascular |
| HNFAE54 | W88613 | WO9854963-A2 | Cancer |
| HNFJH45 | W88614 | WO9854963-A2 | Immune/Hematopoietic |
| HNGBT31 | W88615 | WO9854963-A2 | Immune/Hematopoietic |
| HNGIN60 | W88616 | WO9854963-A2 | Immune/Hematopoietic, Neural/Sensory |
| HNHDW42 | W88618 | WO9854963-A2 | Immune/Hematopoietic |
| HNHFL57 | W88619 | WO9854963-A2 | Immune/Hematopoietic |
| HOGAR52 | W88620 | WO9854963-A2 | Cancer |
| HOSBZ55 | W88621 | WO9854963-A2 | Cancer |
| HOSDI92 | W88622 | WO9854963-A2 | Cancer |
| HPBCU51 | W88623 | WO9854963-A2 | Cancer |
| HNTSU23 | W88628 | WO9854963-A2 | Cancer |
| HRDFB85 | W88629 | WO9854963-A2 | Cancer |
| HSKGN81 | W88631 | WO9854963-A2 | Cancer |
| HSPAH56 | W88632 | WO9854963-A2 | Cancer |
| HDTAL71 | W88633 | WO9854963-A2 | Cancer |
| HSXCS62 | W88634 | WO9854963-A2 | Cancer |
| HTEKM35 | W88636 | WO9854963-A2 | Neural/Sensory, Reproductive |
| HTGEP89 | W88637 | WO9854963-A2 | Immune/Hematopoietic, Neural/Sensory |
| HTPCN79 | W88640 | WO9854963-A2 | Digestive, Neural/Sensory |
| HTSGM54 | W88641 | WO9854963-A2 | Cancer |
| HTWAF58 | W88643 | WO9854963-A2 | Immune/Hematopoietic |
| HTWBY29 | W88644 | WO9854963-A2 | Cancer |
| HUKFC71 | W88645 | WO9854963-A2 | Cancer |
| HCE2V74 | W88646 | WO9854963-A2 | Cancer |
| HFXBW82 | W88652 | WO9854963-A2 | Neural/Sensory |
| HIBED17 | W88654 | WO9854963-A2 | Cancer |
| HPMCJ92 | W88657 | WO9854963-A2 | Musculoskeletal, Reproductive |
| HPWAZ95 | W88658 | WO9854963-A2 | Reproductive |
| HSUBW09 | W88660 | WO9854963-A2 | Digestive, Immune/Hematopoietic |
| HALSQ59 | W88666 | WO9854963-A2 | Cancer |
| HAIBP89 | W88667 | WO9854963-A2 | Cancer |
| HBXGK12 | W88669 | WO9854963-A2 | Cancer |
| HFKFJ07 | W88670 | WO9854963-A2 | Cancer |
| HCWHZ24 | W88672 | WO9854963-A2 | Immune/Hematopoietic |
| HE2GT20 | W88673 | WO9854963-A2 | Cancer |
| HFTCT67 | W88676 | WO9854963-A2 | Cancer |
| HUSIT49 | W88680 | WO9854963-A2 | Cancer |
| HNHED86 | W88684 | WO9854963-A2 | Immune/Hematopoietic |
| HNHFQ63 | W88686 | WO9854963-A2 | Immune/Hematopoietic |
| HAGDQ47 | W88692 | WO9854963-A2 | Cancer |
| HAICP19 | W88693 | WO9854963-A2 | Cancer |
| HCEQA68 | W88699 | WO9854963-A2 | Neural/Sensory |
| HCFNF11 | W88701 | WO9854963-A2 | Cancer |
| HCRBL20 | W88702 | WO9854963-A2 | Cancer |
| HDSAP81 | W88704 | WO9854963-A2 | Cancer |
| HE2CT29 | W88705 | WO9854963-A2 | Mixed Fetal |
| HE8MG65 | W88706 | WO9854963-A2 | Cancer |
| HE9FB42 | W88707 | WO9854963-A2 | Cancer |
| HEMAM41 | W88708 | WO9854963-A2 | Cancer |
| HEMCV19 | W88709 | WO9854963-A2 | Cancer |
| HETAR54 | W88711 | WO9854963-A2 | Cancer |
| HETBX14 | W88712 | WO9854963-A2 | Cancer |
| HFKFI40 | W88714 | WO9854963-A2 | Cancer |
| HFXHN68 | W88715 | WO9854963-A2 | Cancer |
| HGBFO79 | W88716 | WO9854963-A2 | Cancer |
| HGLAM56 | W88717 | WO9854963-A2 | Cancer |
| HHLBA89 | W88718 | WO9854963-A2 | Digestive |
| HIASB53 | W88723 | WO9854963-A2 | Cancer |
| HJABZ65 | W88724 | WO9854963-A2 | Cancer |
| HJPBB39 | W88725 | WO9854963-A2 | Cancer |
| HLHSK94 | W88726 | WO9854963-A2 | Cancer |
| HLMIW92 | W88728 | WO9854963-A2 | Cancer |
| HLTDB65 | W88730 | WO9854963-A2 | Cancer |
| HNFAH08 | W88733 | WO9854963-A2 | Cancer |
| HNGBE45 | W88735 | WO9854963-A2 | Immune/Hematopoietic, Reproductive |
| HNHCM59 | W88737 | WO9854963-A2 | Cancer |
| HCDEO95 | W88740 | WO9854963-A2 | Immune/Hematopoietic, Musculoskeletal, |
| | | | Reproductive |
| HLMMJ13 | W88741 | WO9854963-A2 | Immune/Hematopoietic, Musculoskeletal, |
| | | | Reproductive |
| HPTWA66 | W88742 | WO9854963-A2 | Cancer |
| HSAVU34 | W88743 | WO9854963-A2 | Cancer |
| HSQEO84 | W88744 | WO9854963-A2 | Cancer |
| HETCH46 | W88745 | WO9854963-A2 | Cancer |
| HWTBF59 | W88746 | WO9854963-A2 | Cancer |
| HCESF40 | W88747 | WO9854963-A2 | Immune/Hematopoietic, Neural/Sensory |
| HOFNZ45 | W88748 | WO9854963-A2 | Reproductive |
| HPWAN23 | W88749 | WO9854963-A2 | Cancer |
| HCRBL20 | W88754 | WO9854963-A2 | Cancer |
| HE8MG65 | W88755 | WO9854963-A2 | Cancer |
| HEMAM41 | W88756 | WO9854963-A2 | Cancer |
| HSAVU34 | W88760 | WO9854963-A2 | Cancer |
| HFHDN80 | W88824 | WO9854963-A2 | Cardiovascular, Digestive, Immune/Hematopoietic |
| HHFHR32 | W88830 | WO9854963-A2 | Cancer |
| HSKCP69 | W89024 | WO9854963-A2 | Cancer |
| HTLCU04 | W89076 | WO9854963-A2 | Cancer |
| HSKHZ53 | W92460 | US5871969-A | Cancer |
| HFIZH13 | W94466 | WO9900415-A1 | Cancer |
| HE9SF68 | W97350 | WO9903982-A1 | Cancer |
| HTECE94 | Y00258 | WO9906423-A1 | Cancer |
| HTWAH05 | Y00259 | WO9906423-A1 | Cancer |
| HAQAN31 | Y00260 | WO9906423-A1 | Cancer |
| HAUAQ39 | Y00261 | WO9906423-A1 | Cancer |
| HBNAU27 | Y00262 | WO9906423-A1 | Cancer |
| HSIDD28 | Y00263 | WO9906423-A1 | Cancer |
| HCABR41 | Y00264 | WO9906423-A1 | Cancer |
| HCUAQ30 | Y00265 | WO9906423-A1 | Immune/Hematopoietic |
| HE2AF21 | Y00266 | WO9906423-A1 | Mixed Fetal |
| HE2DC87 | Y00267 | WO9906423-A1 | Mixed Fetal |
| HE2PO86 | Y00269 | WO9906423-A1 | Cancer |
| HFCBD73 | Y00272 | WO9906423-A1 | Cancer |
| HSVAJ05 | Y00273 | WO9906423-A1 | Cancer |
| HLHSA86 | Y00274 | WO9906423-A1 | Cancer |
| H2CAA57 | Y00278 | WO9906423-A1 | Cancer |
| HADFV30 | Y00279 | WO9906423-A1 | Cancer |
| HAIBO71 | Y00280 | WO9906423-A1 | Connective/Epithelial, Digestive, |
| | | | Immune/Hematopoietic |
| HAPAT76 | Y00281 | WO9906423-A1 | Cancer |
| HLHEB47 | Y00282 | WO9906423-A1 | Cancer |
| HLHEF54 | Y00283 | WO9906423-A1 | Cancer |
| HLMMJ78 | Y00286 | WO9906423-A1 | Immune/Hematopoietic |
| HLQBQ85 | Y00287 | WO9906423-A1 | Cancer |
| HLQBR11 | Y00288 | WO9906423-A1 | Cancer |
| HLWBZ56 | Y00289 | WO9906423-A1 | Cancer |
| HMCAR20 | Y00292 | WO9906423-A1 | Cancer |
| HMCAV55 | Y00293 | WO9906423-A1 | Immune/Hematopoietic |
| HMEFS61 | Y00294 | WO9906423-A1 | Cardiovascular |
| HMEJY78 | Y00295 | WO9906423-A1 | Cancer |
| HMWHH16 | Y00298 | WO9906423-A1 | Immune/Hematopoietic |
| HNFFC27 | Y00300 | WO9906423-A1 | Immune/Hematopoietic |
| HNFFC39 | Y00301 | WO9906423-A1 | Immune/Hematopoietic, Reproductive |
| HNGAM20 | Y00302 | WO9906423-A1 | Immune/Hematopoietic |
| HNGDS53 | Y00304 | WO9906423-A1 | Immune/Hematopoietic |
| HNGEW13 | Y00307 | WO9906423-A1 | Immune/Hematopoietic |
| HNGEY51 | Y00308 | WO9906423-A1 | Immune/Hematopoietic |
| HNGEZ47 | Y00309 | WO9906423-A1 | Immune/Hematopoietic |
| HNGFQ33 | Y00310 | WO9906423-A1 | Immune/Hematopoietic |
| HNGFU38 | Y00311 | WO9906423-A1 | Immune/Hematopoietic |
| HSKXE22 | Y00313 | WO9906423-A1 | Cancer |
| HNHBE49 | Y00314 | WO9906423-A1 | Immune/Hematopoietic |
| HNHEC59 | Y00315 | WO9906423-A1 | Immune/Hematopoietic |
| HNHEI54 | Y00317 | WO9906423-A1 | Immune/Hematopoietic, Reproductive |
| HNHER77 | Y00318 | WO9906423-A1 | Immune/Hematopoietic |
| HNHES40 | Y00319 | WO9906423-A1 | Immune/Hematopoietic |
| HNHEV43 | Y00320 | WO9906423-A1 | Immune/Hematopoietic |
| HNHFL46 | Y00321 | WO9906423-A1 | Immune/Hematopoietic |
| HNHFP80 | Y00322 | WO9906423-A1 | Immune/Hematopoietic |
| HNHFS63 | Y00323 | WO9906423-A1 | Immune/Hematopoietic |
| HNHGC56 | Y00324 | WO9906423-A1 | Immune/Hematopoietic |
| HRDEL61 | Y00328 | WO9906423-A1 | Musculoskeletal |
| HSAUC38 | Y00329 | WO9906423-A1 | Immune/Hematopoietic |
| HSAUF49 | Y00330 | WO9906423-A1 | Immune/Hematopoietic |
| HSAUK57 | Y00331 | WO9906423-A1 | Immune/Hematopoietic |
| HSAUL82 | Y00332 | WO9906423-A1 | Immune/Hematopoietic |
| HSAXI90 | Y00333 | WO9906423-A1 | Immune/Hematopoietic |
| HSDGW43 | Y00335 | WO9906423-A1 | Neural/Sensory |
| HSDJM31 | Y00336 | WO9906423-A1 | Digestive, Neural/Sensory |
| HSDJR23 | Y00337 | WO9906423-A1 | Digestive, Neural/Sensory |
| HSDMA90 | Y00338 | WO9906423-A1 | Digestive, Endocrine, Neural/Sensory |
| HSVAJ05 | Y00340 | WO9906423-A1 | Cancer |
| HAPAT76 | Y00341 | WO9906423-A1 | Cancer |
| HNGAM20 | Y00344 | WO9906423-A1 | Immune/Hematopoietic |
| HTXBK30 | Y01135 | WO9901020-A2 | Cancer |
| H2MBB56 | Y01136 | WO9901020-A2 | Cancer |
| HIBCW32 | Y01138 | WO9901020-A2 | Cancer |
| HLHCI58 | Y01139 | WO9901020-A2 | Cancer |
| HLMFG37 | Y01140 | WO9901020-A2 | Cancer |
| HBCAO31 | Y01141 | WO9901020-A2 | Cancer |
| HRDDR94 | Y01142 | WO9901020-A2 | Cancer |
| HSIDY06 | Y01143 | WO9901020-A2 | Cancer |
| HSKGO49 | Y01144 | WO9901020-A2 | Cancer |
| HBXGM67 | Y01146 | WO9901020-A2 | Neural/Sensory |
| HUFAC36 | Y01147 | WO9901020-A2 | Cancer |
| HAGBZ81 | Y01148 | WO9901020-A2 | Excretory, Neural/Sensory |
| HBJCK69 | Y01150 | WO9901020-A2 | Immune/Hematopoietic |
| HCACJ81 | Y01152 | WO9901020-A2 | Cancer |
| HBMWP47 | Y01154 | WO9901020-A2 | Cancer |
| HIBCW32 | Y01155 | WO9901020-A2 | Cancer |
| HCACJ81 | Y01158 | WO9901020-A2 | Cancer |
| HCE3F11 | Y01206 | WO9901020-A2 | Digestive, Neural/Sensory |
| HSXBV35 | Y01383 | WO9903990-A1 | Neural/Sensory |
| HTGAW51 | Y01385 | WO9903990-A1 | Immune/Hematopoietic |
| HTEGM07 | Y01387 | WO9903990-A1 | Cancer |
| HTWFK09 | Y01389 | WO9903990-A1 | Immune/Hematopoietic |
| HTXDJ88 | Y01390 | WO9903990-A1 | Immune/Hematopoietic |
| HUSGC54 | Y01391 | WO9903990-A1 | Cardiovascular, Immune/Hematopoietic, |
| | | | Neural/Sensory |
| HWTAD49 | Y01392 | WO9903990-A1 | Cancer |
| HWTBK81 | Y01393 | WO9903990-A1 | Cancer |
| HACBH16 | Y01394 | WO9903990-A1 | Connective/Epithelial |
| HCUDE16 | Y01395 | WO9903990-A1 | Cancer |
| HLWBZ73 | Y01397 | WO9903990-A1 | Cancer |
| HNGFR75 | Y01398 | WO9903990-A1 | Immune/Hematopoietic |
| HNHFO29 | Y01400 | WO9903990-A1 | Immune/Hematopoietic |
| HONAH29 | Y01401 | WO9903990-A1 | Cancer |
| HGCAB62 | Y01402 | WO9903990-A1 | Cancer |
| HAQBI01 | Y01403 | WO9903990-A1 | Cancer |
| HDPBA48 | Y01405 | WO9903990-A1 | Immune/Hematopoietic |
| HE6CT22 | Y01406 | WO9903990-A1 | Mixed Fetal, Reproductive |
| HE6CT56 | Y01407 | WO9903990-A1 | Mixed Fetal, Neural/Sensory |
| HE6CY88 | Y01408 | WO9903990-A1 | Mixed Fetal |
| HE9FT63 | Y01409 | WO9903990-A1 | Cancer |
| HE9ND43 | Y01410 | WO9903990-A1 | Digestive, Mixed Fetal, Neural/Sensory |
| HERAN63 | Y01411 | WO9903990-A1 | Connective/Epithelial, Reproductive |
| HHBAG14 | Y01413 | WO9903990-A1 | Cancer |
| HMADU73 | Y01417 | WO9903990-A1 | Cancer |
| HMEAI74 | Y01418 | WO9903990-A1 | Cancer |
| HPMBZ15 | Y01421 | WO9903990-A1 | Cancer |
| HROAE16 | Y01422 | WO9903990-A1 | Cancer |
| HSAYM40 | Y01423 | WO9903990-A1 | Immune/Hematopoietic |
| HTBAB28 | Y01426 | WO9903990-A1 | Immune/Hematopoietic |
| HAQBT52 | Y01428 | WO9903990-A1 | Cancer |
| HBIBL04 | Y01429 | WO9903990-A1 | Cancer |
| HBJCI95 | Y01430 | WO9903990-A1 | Cancer |
| HBNBQ61 | Y01431 | WO9903990-A1 | Reproductive |
| HE2ID06 | Y01432 | WO9903990-A1 | Cancer |
| HEBCM63 | Y01433 | WO9903990-A1 | Cancer |
| HFFAK76 | Y01434 | WO9903990-A1 | Neural/Sensory |
| HFRBF28 | Y01435 | WO9903990-A1 | Neural/Sensory |
| HGBHM89 | Y01436 | WO9903990-A1 | Cancer |
| HLMBP18 | Y01437 | WO9903990-A1 | Immune/Hematopoietic |
| HAGFG63 | Y01439 | WO9903990-A1 | Cancer |
| HODAZ55 | Y01440 | WO9903990-A1 | Reproductive |
| HODDF08 | Y01441 | WO9903990-A1 | Reproductive |
| HOSDK95 | Y01442 | WO9903990-A1 | Musculoskeletal |
| HOUAR65 | Y01443 | WO9903990-A1 | Connective/Epithelial |
| HSVAC77 | Y01444 | WO9903990-A1 | Cancer |
| HRSMC69 | Y01445 | WO9903990-A1 | Cancer |
| HNECF34 | Y01446 | WO9903990-A1 | Immune/Hematopoietic |
| HAQAI46 | Y01447 | WO9903990-A1 | Cancer |
| HAQBI01 | Y01448 | WO9903990-A1 | Cancer |
| HJAAT30 | Y01453 | WO9903990-A1 | Cancer |
| HPMJI58 | Y01458 | WO9903990-A1 | Cancer |
| HNECF34 | Y01477 | WO9903990-A1 | Immune/Hematopoietic |
| HCEIA77 | Y02650 | WO9902546-A1 | Cancer |
| HCFCE10 | Y02651 | WO9902546-A1 | Immune/Hematopoietic |
| HCHAA63 | Y02653 | WO9902546-A1 | Cancer |
| HCNSP40 | Y02654 | WO9902546-A1 | Cancer |
| HDAAC10 | Y02655 | WO9902546-A1 | Cardiovascular, Digestive, Reproductive |
| HE8CV18 | Y02656 | WO9902546-A1 | Cancer |
| HFGAL10 | Y02659 | WO9902546-A1 | Mixed Fetal, Neural/Sensory, Reproductive |
| HFKEB72 | Y02660 | WO9902546-A1 | Excretory, Reproductive |
| HFTCU19 | Y02661 | WO9902546-A1 | Cancer |
| HFXHN31 | Y02662 | WO9902546-A1 | Neural/Sensory |
| HCEND31 | Y02663 | WO9902546-A1 | Cancer |
| HJABB94 | Y02664 | WO9902546-A1 | Cancer |
| HLTAI94 | Y02666 | WO9902546-A1 | Immune/Hematopoietic, Reproductive |
| HMELR03 | Y02668 | WO9902546-A1 | Cardiovascular, Immune/Hematopoietic, Mixed |
| | | | Fetal |
| HMKAH10 | Y02669 | WO9902546-A1 | Neural/Sensory, Reproductive |
| HMKCW19 | Y02670 | WO9902546-A1 | Cancer |
| HMSJW18 | Y02671 | WO9902546-A1 | Cancer |
| HMWGY01 | Y02672 | WO9902546-A1 | Immune/Hematopoietic |
| HNFID82 | Y02673 | WO9902546-A1 | Immune/Hematopoietic |
| HNFIG36 | Y02674 | WO9902546-A1 | Immune/Hematopoietic |
| HNGEV29 | Y02675 | WO9902546-A1 | Immune/Hematopoietic |
| HNGJJ65 | Y02677 | WO9902546-A1 | Immune/Hematopoietic |
| HSLBF69 | Y02687 | WO9902546-A1 | Immune/Hematopoietic, Musculoskeletal, |
| | | | Reproductive |
| HSVBH58 | Y02689 | WO9902546-A1 | Cancer |
| HTADX17 | Y02692 | WO9902546-A1 | Immune/Hematopoietic, Reproductive |
| HTDAD22 | Y02693 | WO9902546-A1 | Cancer |
| HTEDS39 | Y02694 | WO9902546-A1 | Cancer |
| HTEHH53 | Y02695 | WO9902546-A1 | Reproductive |
| HTLDP69 | Y02696 | WO9902546-A1 | Cancer |
| HTPCS60 | Y02698 | WO9902546-A1 | Cancer |
| HUKBH05 | Y02699 | WO9902546-A1 | Cancer |
| HADFK68 | Y02703 | WO9902546-A1 | Connective/Epithelial |
| HADGG19 | Y02704 | WO9902546-A1 | Connective/Epithelial, Musculoskeletal |
| HAEAV45 | Y02705 | WO9902546-A1 | Cardiovascular, Reproductive |
| HARAA15 | Y02706 | WO9902546-A1 | Neural/Sensory |
| HBAFQ54 | Y02708 | WO9902546-A1 | Cancer |
| HBIAS26 | Y02710 | WO9902546-A1 | Cancer |
| HBJFU48 | Y02711 | WO9902546-A1 | Immune/Hematopoietic |
| HBJFV28 | Y02712 | WO9902546-A1 | Immune/Hematopoietic, Mixed Fetal, |
| | | | Neural/Sensory |
| HBMWB01 | Y02713 | WO9902546-A1 | Immune/Hematopoietic |
| HBMXN79 | Y02714 | WO9902546-A1 | Cancer |
| HBMXP84 | Y02715 | WO9902546-A1 | Cancer |
| HCFMM26 | Y02716 | WO9902546-A1 | Immune/Hematopoietic |
| HCNAV36 | Y02717 | WO9902546-A1 | Cancer |
| HCNSB01 | Y02718 | WO9902546-A1 | Cancer |
| HCRBR74 | Y02719 | WO9902546-A1 | Cancer |
| HCUBN59 | Y02720 | WO9902546-A1 | Immune/Hematopoietic |
| HCUDB38 | Y02721 | WO9902546-A1 | Immune/Hematopoietic |
| HCUFZ62 | Y02722 | WO9902546-A1 | Immune/Hematopoietic |
| HDPCO25 | Y02724 | WO9902546-A1 | Immune/Hematopoietic |
| HDPHI51 | Y02725 | WO9902546-A1 | Immune/Hematopoietic |
| HE9FE83 | Y02727 | WO9902546-A1 | Immune/Hematopoietic, Mixed Fetal, |
| | | | Musculoskeletal |
| HFPDE69 | Y02731 | WO9902546-A1 | Neural/Sensory |
| HGBGV89 | Y02732 | WO9902546-A1 | Digestive |
| HGLDE38 | Y02733 | WO9902546-A1 | Cancer |
| HHGDU58 | Y02734 | WO9902546-A1 | Musculoskeletal |
| HHTLF25 | Y02735 | WO9902546-A1 | Cancer |
| HKAFB88 | Y02737 | WO9902546-A1 | Cancer |
| HLHFP03 | Y02738 | WO9902546-A1 | Respiratory |
| HLYAF80 | Y02741 | WO9902546-A1 | Immune/Hematopoietic |
| HMKDD07 | Y02743 | WO9902546-A1 | Immune/Hematopoietic, Neural/Sensory |
| HMKDS08 | Y02744 | WO9902546-A1 | Excretory, Neural/Sensory |
| HMSHM14 | Y02745 | WO9902546-A1 | Immune/Hematopoietic |
| HMWDC28 | Y02746 | WO9902546-A1 | Cancer |
| HNFIU96 | Y02749 | WO9902546-A1 | Immune/Hematopoietic |
| HNGAX58 | Y02751 | WO9902546-A1 | Immune/Hematopoietic |
| HNHDL85 | Y02754 | WO9902546-A1 | Immune/Hematopoietic |
| HNHFU59 | Y02755 | WO9902546-A1 | Immune/Hematopoietic |
| HNHFW22 | Y02756 | WO9902546-A1 | Immune/Hematopoietic |
| HODCJ90 | Y02758 | WO9902546-A1 | Cancer |
| HPEBT80 | Y02760 | WO9902546-A1 | Reproductive |
| HSDAG05 | Y02761 | WO9902546-A1 | Cancer |
| HSDGR57 | Y02762 | WO9902546-A1 | Cancer |
| HSDJJ82 | Y02763 | WO9902546-A1 | Neural/Sensory |
| HSDZM95 | Y02764 | WO9902546-A1 | Cancer |
| HSKYU29 | Y02766 | WO9902546-A1 | Cancer |
| HSNAA55 | Y02767 | WO9902546-A1 | Cancer |
| HSQFP66 | Y02768 | WO9902546-A1 | Excretory, Neural/Sensory |
| HJPBB94 | Y02769 | WO9902546-A1 | Cancer |
| HSSJN64 | Y02770 | WO9902546-A1 | Musculoskeletal |
| HSVAQ28 | Y02771 | WO9902546-A1 | Cancer |
| HFTCU19 | Y02775 | WO9902546-A1 | Cancer |
| HGLAM53 | Y02777 | WO9902546-A1 | Immune/Hematopoietic, Neural/Sensory, |
| | | | Reproductive |
| HMKCW19 | Y02778 | WO9902546-A1 | Cancer |
| HMWGY01 | Y02779 | WO9902546-A1 | Immune/Hematopoietic |
| HSOAH66 | Y02782 | WO9902546-A1 | Digestive |
| HUKEX85 | Y02785 | WO9902546-A1 | Musculoskeletal, Reproductive |
| HSIDI15 | Y02975 | WO9902546-A1 | Digestive, Immune/Hematopoietic |
| HUKEJ46 | Y03850 | WO9909198-A1 | Digestive, Reproductive |
| HPASD50 | Y04120 | WO9909161-A1 | Cancer |
| HPASD50 | Y04121 | WO9909161-A1 | Cancer |
| HSDIT06 | Y04295 | WO9910363-A1 | Neural/Sensory, Reproductive |
| HSKEI54 | Y04297 | WO9910363-A1 | Cancer |
| HTNAG39 | Y04300 | WO9910363-A1 | Cancer |
| HTODL90 | Y04301 | WO9910363-A1 | Immune/Hematopoietic |
| HTWDC20 | Y04302 | WO9910363-A1 | Immune/Hematopoietic |
| HUFAT34 | Y04303 | WO9910363-A1 | Cancer |
| HAICJ23 | Y04305 | WO9910363-A1 | Cancer |
| HAPOF67 | Y04306 | WO9910363-A1 | Digestive, Excretory, Musculoskeletal |
| HE8DG53 | Y04308 | WO9910363-A1 | Cancer |
| HFSAY85 | Y04309 | WO9910363-A1 | Cancer |
| HHEDD41 | Y04310 | WO9910363-A1 | Cancer |
| HKCSO46 | Y04311 | WO9910363-A1 | Cancer |
| HKGAV60 | Y04312 | WO9910363-A1 | Cancer |
| HKGDJ66 | Y04314 | WO9910363-A1 | Cancer |
| HMCDK27 | Y04315 | WO9910363-A1 | Cancer |
| HMCDX48 | Y04316 | WO9910363-A1 | Cancer |
| HMIAS24 | Y04317 | WO9910363-A1 | Immune/Hematopoietic, Neural/Sensory |
| HNFEG11 | Y04318 | WO9910363-A1 | Immune/Hematopoietic |
| HNGEP09 | Y04319 | WO9910363-A1 | Immune/Hematopoietic |
| HTXKK52 | Y04320 | WO9910363-A1 | Immune/Hematopoietic |
| HNGJP90 | Y04321 | WO9910363-A1 | Immune/Hematopoietic |
| HFVIF40 | Y06461 | WO9931116-A1 | Cancer |
| HFCCQ50 | Y06462 | WO9931116-A1 | Cancer |
| HDPIE88 | Y06511 | WO9936565-A1 | Cancer |
| HCWHN10 | Y07746 | WO9909155-A1 | Immune/Hematopoietic |
| HDTAE40 | Y07748 | WO9909155-A1 | Digestive, Immune/Hematopoietic |
| HE8DY08 | Y07751 | WO9909155-A1 | Cancer |
| HE9ND27 | Y07753 | WO9909155-A1 | Cancer |
| HCE3G69 | Y07754 | WO9909155-A1 | Cancer |
| HEAAX57 | Y07755 | WO9909155-A1 | Reproductive |
| HEMGD15 | Y07759 | WO9909155-A1 | Cancer |
| HEQBR95 | Y07760 | WO9909155-A1 | Cancer |
| HFKGE44 | Y07764 | WO9909155-A1 | Cancer |
| HFPCY39 | Y07765 | WO9909155-A1 | Cancer |
| HFXDX75 | Y07768 | WO9909155-A1 | Neural/Sensory |
| HFXJC53 | Y07770 | WO9909155-A1 | Neural/Sensory, Reproductive, Respiratory |
| HFXJW48 | Y07771 | WO9909155-A1 | Cancer |
| HGBGO11 | Y07772 | WO9909155-A1 | Cancer |
| HGBHM10 | Y07773 | WO9909155-A1 | Cancer |
| HSWAY58 | Y07776 | WO9909155-A1 | Cancer |
| HTEIM65 | Y07779 | WO9909155-A1 | Immune/Hematopoietic, Reproductive |
| HTHBX95 | Y07780 | WO9909155-A1 | Cancer |
| HTLDQ56 | Y07781 | WO9909155-A1 | Reproductive |
| HTOFU06 | Y07782 | WO9909155-A1 | Immune/Hematopoietic, Musculoskeletal |
| HTWEE31 | Y07785 | WO9909155-A1 | Immune/Hematopoietic |
| HUSAO56 | Y07789 | WO9909155-A1 | Cancer |
| HUSIJ08 | Y07790 | WO9909155-A1 | Cancer |
| HAGBD57 | Y07791 | WO9909155-A1 | Excretory, Neural/Sensory |
| HBAFA04 | Y07793 | WO9909155-A1 | Cancer |
| HBJES16 | Y07794 | WO9909155-A1 | Cancer |
| HCEFZ05 | Y07796 | WO9909155-A1 | Mixed Fetal, Neural/Sensory |
| HCFMX95 | Y07797 | WO9909155-A1 | Immune/Hematopoietic |
| HLYHA71 | Y07798 | WO9909155-A1 | Cancer |
| HEBAL06 | Y07800 | WO9909155-A1 | Neural/Sensory |
| HEIAB33 | Y07801 | WO9909155-A1 | Cancer |
| HEPBC02 | Y07802 | WO9909155-A1 | Cancer |
| HFTBY96 | Y07803 | WO9909155-A1 | Immune/Hematopoietic, Neural/Sensory, |
| | | | Reproductive |
| HKMMM61 | Y07804 | WO9909155-A1 | Cancer |
| HLQBQ38 | Y07806 | WO9909155-A1 | Cancer |
| HMKCP66 | Y07807 | WO9909155-A1 | Neural/Sensory |
| HWTAL40 | Y07808 | WO9909155-A1 | Cancer |
| HNHDR03 | Y07809 | WO9909155-A1 | Immune/Hematopoietic |
| HNHFH41 | Y07810 | WO9909155-A1 | Immune/Hematopoietic |
| HNHFI81 | Y07811 | WO9909155-A1 | Immune/Hematopoietic |
| HOSFQ28 | Y07812 | WO9909155-A1 | Cancer |
| HPRAL78 | Y07813 | WO9909155-A1 | Cancer |
| HEAAA85 | Y07814 | WO9909155-A1 | Cancer |
| HDTAR09 | Y07816 | WO9909155-A1 | Cancer |
| HLYHA71 | Y07843 | WO9909155-A1 | Cancer |
| HCWCH14 | Y07852 | WO9918208-A1 | Immune/Hematopoietic |
| HE9MI43 | Y07855 | WO9918208-A1 | Cancer |
| HE2PI29 | Y07859 | WO9918208-A1 | Cancer |
| HLHDP83 | Y07862 | WO9918208-A1 | Cancer |
| HSIAS17 | Y07863 | WO9918208-A1 | Cancer |
| HOSDG32 | Y07866 | WO9918208-A1 | Cancer |
| HMUBU59 | Y07867 | WO9918208-A1 | Cancer |
| HWTCE21 | Y07868 | WO9918208-A1 | Cancer |
| HFIUM15 | Y07869 | WO9918208-A1 | Cancer |
| HTLAF13 | Y07872 | WO9918208-A1 | Reproductive |
| HTLFI93 | Y07873 | WO9918208-A1 | Immune/Hematopoietic, Reproductive, Respiratory |
| HBXGI20 | Y07874 | WO9918208-A1 | Cancer |
| HTPBH21 | Y07875 | WO9918208-A1 | Connective/Epithelial, Digestive, Reproductive |
| HSQAB87 | Y07876 | WO9918208-A1 | Cancer |
| HTEDJ94 | Y07877 | WO9918208-A1 | Cancer |
| HKMLM11 | Y07878 | WO9918208-A1 | Cancer |
| HNEAC05 | Y07879 | WO9918208-A1 | Immune/Hematopoietic |
| HETEW02 | Y07880 | WO9918208-A1 | Cancer |
| HLMCA59 | Y07882 | WO9918208-A1 | Immune/Hematopoietic |
| HOAAC90 | Y07883 | WO9918208-A1 | Musculoskeletal |
| HMFJQ68 | Y07884 | WO9918208-A1 | Cancer |
| HRTAE58 | Y07888 | WO9918208-A1 | Digestive, Reproductive |
| HSKNB54 | Y07889 | WO9918208-A1 | Cancer |
| HSKNT34 | Y07890 | WO9918208-A1 | Cancer |
| HTEDY42 | Y07891 | WO9918208-A1 | Reproductive |
| HTLAA40 | Y07892 | WO9918208-A1 | Reproductive |
| HTNBO91 | Y07893 | WO9918208-A1 | Cancer |
| H6BSD90 | Y07894 | WO9918208-A1 | Cancer |
| HBJBQ35 | Y07895 | WO9918208-A1 | Immune/Hematopoietic |
| HCE1Q89 | Y07896 | WO9918208-A1 | Immune/Hematopoietic, Neural/Sensory |
| HCNSB61 | Y07897 | WO9918208-A1 | Digestive, Immune/Hematopoietic |
| HCDBO20 | Y07898 | WO9918208-A1 | Musculoskeletal, Respiratory |
| HBNAW17 | Y07899 | WO9918208-A1 | Reproductive |
| HEAAH81 | Y07902 | WO9918208-A1 | Cancer |
| HEBAE88 | Y07903 | WO9918208-A1 | Immune/Hematopoietic, Neural/Sensory |
| HFXGV31 | Y07904 | WO9918208-A1 | Neural/Sensory |
| HEAAJ57 | Y07905 | WO9918208-A1 | Immune/Hematopoietic, Reproductive |
| HCFMV71 | Y07906 | WO9918208-A1 | Immune/Hematopoietic |
| HGBDL30 | Y07910 | WO9918208-A1 | Digestive |
| HFKEN81 | Y07911 | WO9918208-A1 | Excretory, Neural/Sensory |
| HFPCX36 | Y07912 | WO9918208-A1 | Neural/Sensory |
| HFRAN90 | Y07913 | WO9918208-A1 | Neural/Sensory |
| HHGBO91 | Y07915 | WO9918208-A1 | Digestive, Reproductive |
| HERAN54 | Y07917 | WO9918208-A1 | Connective/Epithelial |
| HFXDE67 | Y07918 | WO9918208-A1 | Neural/Sensory |
| HFFAD59 | Y07921 | WO9918208-A1 | Neural/Sensory |
| HMDAE65 | Y07923 | WO9918208-A1 | Neural/Sensory |
| HMEGF92 | Y07925 | WO9918208-A1 | Cardiovascular |
| HNGIK36 | Y07926 | WO9918208-A1 | Immune/Hematopoietic |
| HMEJJ27 | Y07927 | WO9918208-A1 | Cardiovascular |
| HNHCY64 | Y07928 | WO9918208-A1 | Immune/Hematopoietic |
| HNHCY94 | Y07929 | WO9918208-A1 | Immune/Hematopoietic |
| HNEBN76 | Y07930 | WO9918208-A1 | Immune/Hematopoietic, Reproductive, Respiratory |
| HMEFT54 | Y07931 | WO9918208-A1 | Cardiovascular, Musculoskeletal, Reproductive |
| HLQBE09 | Y07932 | WO9918208-A1 | Digestive |
| HMWBC11 | Y07933 | WO9918208-A1 | Immune/Hematopoietic |
| HNGJR78 | Y07934 | WO9918208-A1 | Immune/Hematopoietic |
| HNGDP26 | Y07935 | WO9918208-A1 | Immune/Hematopoietic |
| HNGJH63 | Y07936 | WO9918208-A1 | Immune/Hematopoietic |
| HMDAL04 | Y07937 | WO9918208-A1 | Neural/Sensory |
| HMWHX28 | Y07938 | WO9918208-A1 | Immune/Hematopoietic |
| HNHGB09 | Y07942 | WO9918208-A1 | Immune/Hematopoietic |
| HNHHA15 | Y07943 | WO9918208-A1 | Immune/Hematopoietic |
| HHGDC01 | Y07944 | WO9918208-A1 | Cancer |
| HMWGU74 | Y07945 | WO9918208-A1 | Immune/Hematopoietic |
| HNGCF72 | Y07946 | WO9918208-A1 | Immune/Hematopoietic |
| HOACB38 | Y07947 | WO9918208-A1 | Musculoskeletal |
| HLMFD11 | Y07950 | WO9918208-A1 | Immune/Hematopoietic |
| HLYBA22 | Y07952 | WO9918208-A1 | Immune/Hematopoietic |
| HCWCH14 | Y07953 | WO9918208-A1 | Immune/Hematopoietic |
| HBMWF85 | Y10797 | WO9907891-A1 | Immune/Hematopoietic |
| HCDEJ37 | Y10798 | WO9907891-A1 | Immune/Hematopoietic, Musculoskeletal |
| HCE3L18 | Y10799 | WO9907891-A1 | Neural/Sensory |
| HCYBI42 | Y10800 | WO9907891-A1 | Cancer |
| HE6FB81 | Y10801 | WO9907891-A1 | Mixed Fetal |
| HFAMB72 | Y10802 | WO9907891-A1 | Cancer |
| HFCDW42 | Y10803 | WO9907891-A1 | Cancer |
| HFPAE26 | Y10804 | WO9907891-A1 | Neural/Sensory |
| HFXJM91 | Y10805 | WO9907891-A1 | Cancer |
| HJABX32 | Y10807 | WO9907891-A1 | Cancer |
| HJMBW30 | Y10808 | WO9907891-A1 | Cancer |
| HSVAT02 | Y10810 | WO9907891-A1 | Cancer |
| HSVBM90 | Y10811 | WO9907891-A1 | Cancer |
| HSYBL17 | Y10812 | WO9907891-A1 | Cancer |
| HTEBI28 | Y10813 | WO9907891-A1 | Reproductive |
| HTPDS14 | Y10814 | WO9907891-A1 | Cancer |
| HTSGG36 | Y10815 | WO9907891-A1 | Cancer |
| HODCJ27 | Y10816 | WO9907891-A1 | Cancer |
| HTXDB52 | Y10819 | WO9907891-A1 | Immune/Hematopoietic, Musculoskeletal |
| HTXDP60 | Y10820 | WO9907891-A1 | Cancer |
| HTXEB42 | Y10821 | WO9907891-A1 | Cancer |
| HBAFZ29 | Y10824 | WO9907891-A1 | Cancer |
| HBAHA77 | Y10826 | WO9907891-A1 | Cancer |
| HBJEW84 | Y10827 | WO9907891-A1 | Immune/Hematopoietic |
| HBJFE12 | Y10828 | WO9907891-A1 | Immune/Hematopoietic |
| HCFBM53 | Y10830 | WO9907891-A1 | Cancer |
| HCFBQ81 | Y10831 | WO9907891-A1 | Immune/Hematopoietic |
| HCFCI07 | Y10832 | WO9907891-A1 | Immune/Hematopoietic |
| HCFDD76 | Y10833 | WO9907891-A1 | Cancer |
| HCFMJ81 | Y10834 | WO9907891-A1 | Cancer |
| HCFOG45 | Y10835 | WO9907891-A1 | Cancer |
| HCUBN71 | Y10836 | WO9907891-A1 | Immune/Hematopoietic, Reproductive |
| HHEMA75 | Y10837 | WO9907891-A1 | Cancer |
| HHPTJ65 | Y10839 | WO9907891-A1 | Cardiovascular, Musculoskeletal, Neural/Sensory |
| HHSDR11 | Y10840 | WO9907891-A1 | Neural/Sensory |
| HLJDQ62 | Y10842 | WO9907891-A1 | Cancer |
| HKGBS49 | Y10843 | WO9907891-A1 | Reproductive |
| HKISA27 | Y10844 | WO9907891-A1 | Cancer |
| HKIXE06 | Y10845 | WO9907891-A1 | Cancer |
| HKMMV77 | Y10846 | WO9907891-A1 | Excretory, Reproductive |
| HLYAB80 | Y10850 | WO9907891-A1 | Cancer |
| HLYAG19 | Y10851 | WO9907891-A1 | Digestive, Immune/Hematopoietic |
| HLYBY48 | Y10852 | WO9907891-A1 | Immune/Hematopoietic |
| HMUAW28 | Y10853 | WO9907891-A1 | Immune/Hematopoietic, Musculoskeletal |
| HMWHC36 | Y10854 | WO9907891-A1 | Cancer |
| HNFIS82 | Y10856 | WO9907891-A1 | Digestive, Immune/Hematopoietic, Reproductive |
| HNGBO16 | Y10859 | WO9907891-A1 | Immune/Hematopoietic |
| HNGBQ90 | Y10860 | WO9907891-A1 | Cancer |
| HNGBV72 | Y10861 | WO9907891-A1 | Immune/Hematopoietic |
| HNGEG08 | Y10863 | WO9907891-A1 | Immune/Hematopoietic |
| HNGFI02 | Y10864 | WO9907891-A1 | Immune/Hematopoietic |
| HNGGF85 | Y10865 | WO9907891-A1 | Immune/Hematopoietic |
| HNGHM75 | Y10866 | WO9907891-A1 | Immune/Hematopoietic |
| HNGIN84 | Y10867 | WO9907891-A1 | Digestive, Endocrine, Immune/Hematopoietic |
| HNGJH08 | Y10869 | WO9907891-A1 | Immune/Hematopoietic |
| HNHAH01 | Y10870 | WO9907891-A1 | Immune/Hematopoietic |
| HNHET53 | Y10871 | WO9907891-A1 | Immune/Hematopoietic |
| HOABP21 | Y10872 | WO9907891-A1 | Cancer |
| HODAA12 | Y10873 | WO9907891-A1 | Immune/Hematopoietic, Neural/Sensory, |
| | | | Reproductive |
| HFKDH44 | Y10874 | WO9907891-A1 | Cancer |
| HOVAP06 | Y10875 | WO9907891-A1 | Reproductive |
| HPEAE34 | Y10876 | WO9907891-A1 | Reproductive |
| HPTRO86 | Y10877 | WO9907891-A1 | Cancer |
| HSAXJ60 | Y10878 | WO9907891-A1 | Immune/Hematopoietic |
| HSAXM32 | Y10879 | WO9907891-A1 | Cancer |
| HSKND71 | Y10882 | WO9907891-A1 | Mixed Fetal, Musculoskeletal, Neural/Sensory |
| HSOAC84 | Y10883 | WO9907891-A1 | Digestive |
| HFKCF34 | Y10884 | WO9907891-A1 | Cancer |
| HSAAO30 | Y12916 | WO9911293-A1 | Cancer |
| HSQBL21 | Y12917 | WO9911293-A1 | Cancer |
| HTEFU41 | Y12919 | WO9911293-A1 | Immune/Hematopoietic, Reproductive |
| HDPSP54 | Y12920 | WO9911293-A1 | Cancer |
| HELFQ07 | Y12921 | WO9911293-A1 | Cancer |
| HBSAJ16 | Y12923 | WO9911293-A1 | Connective/Epithelial, Musculoskeletal, |
| | | | Reproductive |
| HCEOC41 | Y12924 | WO9911293-A1 | Cancer |
| HCUEO60 | Y12926 | WO9911293-A1 | Immune/Hematopoietic |
| HDHEB60 | Y12927 | WO9911293-A1 | Cancer |
| HE6AJ31 | Y12928 | WO9911293-A1 | Mixed Fetal |
| HFCED59 | Y12929 | WO9911293-A1 | Immune/Hematopoietic, Neural/Sensory |
| HFXKJ03 | Y12931 | WO9911293-A1 | Cardiovascular, Immune/Hematopoietic, |
| | | | Neural/Sensory |
| HHFDG44 | Y12932 | WO9911293-A1 | Cardiovascular, Endocrine, Immune/Hematopoietic |
| HJACG02 | Y12933 | WO9911293-A1 | Digestive, Immune/Hematopoietic |
| HKGAJ54 | Y12934 | WO9911293-A1 | Cancer |
| HKMAB92 | Y12935 | WO9911293-A1 | Cancer |
| HLMFC54 | Y12937 | WO9911293-A1 | Immune/Hematopoietic |
| HLWBZ21 | Y12939 | WO9911293-A1 | Immune/Hematopoietic, Reproductive |
| HMJAX71 | Y12940 | WO9911293-A1 | Neural/Sensory |
| HNECU95 | Y12941 | WO9911293-A1 | Connective/Epithelial, Immune/Hematopoietic |
| HNFCK41 | Y12942 | WO9911293-A1 | Cancer |
| HNFHD08 | Y12943 | WO9911293-A1 | Cancer |
| HNGEW65 | Y12944 | WO9911293-A1 | Endocrine, Immune/Hematopoietic |
| HNHEN68 | Y12946 | WO9911293-A1 | Immune/Hematopoietic |
| HNHFG05 | Y12947 | WO9911293-A1 | Immune/Hematopoietic |
| HODBF19 | Y12948 | WO9911293-A1 | Cancer |
| HOEBK34 | Y12949 | WO9911293-A1 | Digestive, Musculoskeletal |
| HPBCC51 | Y12950 | WO9911293-A1 | Cancer |
| HRGDC48 | Y12951 | WO9911293-A1 | Immune/Hematopoietic, Musculoskeletal |
| HSDJB13 | Y12952 | WO9911293-A1 | Cancer |
| HTEHR24 | Y12953 | WO9911293-A1 | Cancer |
| HARAO51 | Y12957 | WO9911293-A1 | Cancer |
| HATAA15 | Y12958 | WO9911293-A1 | Cancer |
| HATCK44 | Y12959 | WO9911293-A1 | Cancer |
| HBIAE26 | Y12960 | WO9911293-A1 | Neural/Sensory, Reproductive |
| HBMXG32 | Y12961 | WO9911293-A1 | Immune/Hematopoietic |
| HCDAT43 | Y12963 | WO9911293-A1 | Cancer |
| HSLJB89 | Y12964 | WO9911293-A1 | Cancer |
| HBAFC77 | Y12966 | WO9911293-A1 | Cancer |
| HSAAO30 | Y12969 | WO9911293-A1 | Cancer |
| HFCET92 | Y14078 | WO9921575-A1 | Cancer |
| HSIDU19 | Y14411 | WO9919339-A1 | Digestive |
| HPRSB76 | Y14412 | WO9919339-A1 | Reproductive |
| HTEIL66 | Y14413 | WO9919339-A1 | Reproductive |
| HSABG21 | Y14415 | WO9919339-A1 | Cancer |
| HSAXB32 | Y14416 | WO9919339-A1 | Immune/Hematopoietic |
| HPEAD48 | Y14417 | WO9919339-A1 | Reproductive |
| HPVAB94 | Y14418 | WO9919339-A1 | Reproductive |
| HSAXB81 | Y14419 | WO9919339-A1 | Immune/Hematopoietic |
| HSLCU73 | Y14421 | WO9919339-A1 | Musculoskeletal |
| HTEIP36 | Y14423 | WO9919339-A1 | Reproductive |
| HYBAY77 | Y14424 | WO9919339-A1 | Immune/Hematopoietic, Musculoskeletal, |
| | | | Reproductive |
| HROAE78 | Y14425 | WO9919339-A1 | Digestive |
| HSAVP17 | Y14426 | WO9919339-A1 | Immune/Hematopoietic |
| HSIEA14 | Y14427 | WO9919339-A1 | Digestive |
| HPEAD79 | Y14430 | WO9919339-A1 | Reproductive |
| HRDED19 | Y14431 | WO9919339-A1 | Musculoskeletal |
| HSAYS89 | Y14432 | WO9919339-A1 | Immune/Hematopoietic |
| HTODK73 | Y14433 | WO9919339-A1 | Cancer |
| HSVAM10 | Y14434 | WO9919339-A1 | Cancer |
| HSPAA60 | Y14439 | WO9919339-A1 | Digestive |
| HFAEF57 | Y14440 | WO9919339-A1 | Neural/Sensory |
| HEGAH43 | Y14441 | WO9919339-A1 | Digestive, Reproductive |
| HNGBX63 | Y14443 | WO9919339-A1 | Immune/Hematopoietic |
| HE2AG50 | Y14444 | WO9919339-A1 | Digestive, Mixed Fetal, Neural/Sensory |
| HCUIN80 | Y14445 | WO9919339-A1 | Immune/Hematopoietic |
| HADCL29 | Y14446 | WO9919339-A1 | Connective/Epithelial |
| HAPPS89 | Y14447 | WO9919339-A1 | Cancer |
| HFGAH44 | Y14448 | WO9919339-A1 | Cancer |
| HFIHZ96 | Y14449 | WO9919339-A1 | Musculoskeletal |
| HFIUR10 | Y14450 | WO9919339-A1 | Digestive, Immune/Hematopoietic, |
| | | | Musculoskeletal |
| HLDNA86 | Y14451 | WO9919339-A1 | Cancer |
| HCUIO20 | Y14453 | WO9919339-A1 | Immune/Hematopoietic |
| HLTEF12 | Y14454 | WO9919339-A1 | Cancer |
| HCFBJ91 | Y14455 | WO9919339-A1 | Immune/Hematopoietic |
| HHFHP90 | Y14456 | WO9919339-A1 | Cardiovascular |
| HLYCQ48 | Y14457 | WO9919339-A1 | Immune/Hematopoietic |
| HHLAB07 | Y14458 | WO9919339-A1 | Digestive, Immune/Hematopoietic |
| HFOXE30 | Y14459 | WO9919339-A1 | Musculoskeletal |
| HBJEL68 | Y14460 | WO9919339-A1 | Immune/Hematopoietic, Neural/Sensory |
| HFIUR35 | Y14462 | WO9919339-A1 | Musculoskeletal |
| HFIZF58 | Y16587 | US5916769-A | Cancer |
| HNGDJ72 | Y19443 | WO9922243-A1 | Immune/Hematopoietic |
| HNGEO29 | Y19444 | WO9922243-A1 | Immune/Hematopoietic |
| HNHDL95 | Y19445 | WO9922243-A1 | Immune/Hematopoietic |
| HAGDS35 | Y19446 | WO9922243-A1 | Cancer |
| HNGEQ48 | Y19447 | WO9922243-A1 | Immune/Hematopoietic |
| HNGDG40 | Y19448 | WO9922243-A1 | Immune/Hematopoietic |
| HNGEN81 | Y19449 | WO9922243-A1 | Immune/Hematopoietic |
| H2MAC30 | Y19450 | WO9922243-A1 | Cancer |
| HNHFB16 | Y19451 | WO9922243-A1 | Immune/Hematopoietic |
| HPFCL43 | Y19452 | WO9922243-A1 | Cancer |
| HSATR82 | Y19453 | WO9922243-A1 | Immune/Hematopoietic |
| HNHIC21 | Y19455 | WO9922243-A1 | Immune/Hematopoietic |
| HOVCA92 | Y19456 | WO9922243-A1 | Immune/Hematopoietic, Reproductive |
| HSDIL30 | Y19458 | WO9922243-A1 | Neural/Sensory |
| HATDB65 | Y19459 | WO9922243-A1 | Endocrine, Reproductive, Respiratory |
| HTTEA24 | Y19461 | WO9922243-A1 | Digestive, Reproductive |
| HAGDS20 | Y19462 | WO9922243-A1 | Neural/Sensory, Reproductive |
| HSDJM30 | Y19463 | WO9922243-A1 | Digestive, Neural/Sensory |
| HNHEE88 | Y19464 | WO9922243-A1 | Immune/Hematopoietic |
| HSLFD55 | Y19465 | WO9922243-A1 | Musculoskeletal |
| HSAXJ29 | Y19466 | WO9922243-A1 | Immune/Hematopoietic |
| HSFAM39 | Y19467 | WO9922243-A1 | Reproductive |
| HADDZ85 | Y19469 | WO9922243-A1 | Connective/Epithelial, Immune/Hematopoietic, |
| | | | Neural/Sensory |
| HDPCM26 | Y19470 | WO9922243-A1 | Cancer |
| HSZAA13 | Y19471 | WO9922243-A1 | Cancer |
| HDTBP04 | Y19472 | WO9922243-A1 | Digestive, Immune/Hematopoietic |
| HHGCQ54 | Y19473 | WO9922243-A1 | Cancer |
| HSNAB12 | Y19474 | WO9922243-A1 | Cardiovascular |
| HBJID05 | Y19475 | WO9922243-A1 | Immune/Hematopoietic |
| HSNBM49 | Y19476 | WO9922243-A1 | Cancer |
| HJMBF77 | Y19477 | WO9922243-A1 | Cancer |
| HJMBM38 | Y19478 | WO9922243-A1 | Cancer |
| HHGCL33 | Y19479 | WO9922243-A1 | Cancer |
| HCEWE20 | Y19480 | WO9922243-A1 | Endocrine, Immune/Hematopoietic, |
| | | | Neural/Sensory |
| HCUHL13 | Y19481 | WO9922243-A1 | Immune/Hematopoietic |
| HBJHO68 | Y19482 | WO9922243-A1 | Immune/Hematopoietic |
| HCWDV84 | Y19483 | WO9922243-A1 | Immune/Hematopoietic |
| HBXFC78 | Y19484 | WO9922243-A1 | Cancer |
| HE2FI45 | Y19485 | WO9922243-A1 | Cancer |
| HEOMG13 | Y19486 | WO9922243-A1 | Digestive, Immune/Hematopoietic, Reproductive |
| HFAMH77 | Y19487 | WO9922243-A1 | Cancer |
| HSVCF20 | Y19488 | WO9922243-A1 | Cancer |
| HISAG02 | Y19489 | WO9922243-A1 | Cancer |
| HCDAF84 | Y19490 | WO9922243-A1 | Musculoskeletal |
| HHAAC17 | Y19491 | WO9922243-A1 | Digestive, Musculoskeletal, Neural/Sensory |
| HEQAG39 | Y19493 | WO9922243-A1 | Cancer |
| HKACH44 | Y19494 | WO9922243-A1 | Cancer |
| HBNBG49 | Y19495 | WO9922243-A1 | Cancer |
| HE2EN04 | Y19496 | WO9922243-A1 | Cancer |
| HSVAA10 | Y19497 | WO9922243-A1 | Cardiovascular |
| HFPBA88 | Y19498 | WO9922243-A1 | Cancer |
| HHEBW54 | Y19500 | WO9922243-A1 | Cancer |
| HFEBH21 | Y19501 | WO9922243-A1 | Connective/Epithelial, Reproductive |
| HFTDZ36 | Y19502 | WO9922243-A1 | Cancer |
| HGLAW96 | Y19503 | WO9922243-A1 | Immune/Hematopoietic, Neural/Sensory |
| HKAFK41 | Y19504 | WO9922243-A1 | Cancer |
| HOSEG51 | Y19505 | WO9922243-A1 | Endocrine, Immune/Hematopoietic, |
| | | | Musculoskeletal |
| HTEJT39 | Y19506 | WO9922243-A1 | Neural/Sensory, Reproductive |
| HPTRH45 | Y19507 | WO9922243-A1 | Cancer |
| HDHMA72 | Y19508 | WO9922243-A1 | Cancer |
| HNTBL27 | Y19509 | WO9922243-A1 | Cancer |
| HCFMX35 | Y19510 | WO9922243-A1 | Immune/Hematopoietic |
| HMUAO21 | Y19512 | WO9922243-A1 | Cancer |
| HCHAR28 | Y19513 | WO9922243-A1 | Cancer |
| HLYDU25 | Y19514 | WO9922243-A1 | Immune/Hematopoietic |
| HOEJH89 | Y19515 | WO9922243-A1 | Cancer |
| HPFDG48 | Y19516 | WO9922243-A1 | Immune/Hematopoietic, Reproductive |
| HWTBM18 | Y19517 | WO9922243-A1 | Immune/Hematopoietic, Musculoskeletal |
| HCFOM18 | Y19518 | WO9922243-A1 | Immune/Hematopoietic |
| HMWFO02 | Y19519 | WO9922243-A1 | Immune/Hematopoietic |
| HNGAV42 | Y19520 | WO9922243-A1 | Immune/Hematopoietic |
| HSDSE75 | Y19522 | WO9922243-A1 | Musculoskeletal, Neural/Sensory, Respiratory |
| HLMFD85 | Y19523 | WO9922243-A1 | Immune/Hematopoietic |
| HLQCJ74 | Y19524 | WO9922243-A1 | Digestive, Immune/Hematopoietic |
| HTEFU65 | Y19526 | WO9922243-A1 | Excretory, Immune/Hematopoietic, Reproductive |
| HLYBF22 | Y19527 | WO9922243-A1 | Immune/Hematopoietic, Mixed Fetal |
| HMDAP35 | Y19528 | WO9922243-A1 | Neural/Sensory |
| HWBCN75 | Y19530 | WO9922243-A1 | Cancer |
| HROAH06 | Y19531 | WO9922243-A1 | Digestive, Immune/Hematopoietic |
| HSAXA83 | Y19532 | WO9922243-A1 | Immune/Hematopoietic |
| HSDJE10 | Y19533 | WO9922243-A1 | Cancer |
| HBAMA40 | Y19534 | WO9922243-A1 | Excretory |
| HBAMB34 | Y19535 | WO9922243-A1 | Excretory, Reproductive |
| HCWKC15 | Y19536 | WO9922243-A1 | Immune/Hematopoietic |
| HDTDM65 | Y19537 | WO9922243-A1 | Cancer |
| HMMBF71 | Y19538 | WO9922243-A1 | Immune/Hematopoietic |
| HPBDH41 | Y19539 | WO9922243-A1 | Immune/Hematopoietic, Musculoskeletal |
| HPBEN24 | Y19540 | WO9922243-A1 | Cancer |
| HCUIM65 | Y19541 | WO9922243-A1 | Cancer |
| HKNAA95 | Y19542 | WO9922243-A1 | Digestive, Excretory, Immune/Hematopoietic |
| HKIYH57 | Y19543 | WO9922243-A1 | Cancer |
| HBJMG49 | Y19546 | WO9922243-A1 | Immune/Hematopoietic |
| H6EDC19 | Y19547 | WO9922243-A1 | Cancer |
| HSKHZ81 | Y19548 | WO9922243-A1 | Cancer |
| HBJFX78 | Y19549 | WO9922243-A1 | Cancer |
| HEMFS60 | Y19550 | WO9922243-A1 | Cancer |
| HKACB56 | Y19551 | WO9922243-A1 | Connective/Epithelial |
| HTXJX80 | Y19552 | WO9922243-A1 | Digestive, Immune/Hematopoietic |
| HAFBD61 | Y19553 | WO9922243-A1 | Cancer |
| HBJJU28 | Y19554 | WO9922243-A1 | Immune/Hematopoietic, Neural/Sensory |
| HNHEI47 | Y19555 | WO9922243-A1 | Immune/Hematopoietic |
| HPMFY74 | Y19556 | WO9922243-A1 | Reproductive |
| HLYAP91 | Y19559 | WO9922243-A1 | Digestive, Immune/Hematopoietic, Reproductive |
| HSKNB56 | Y19560 | WO9922243-A1 | Cancer |
| HHGCW91 | Y19561 | WO9922243-A1 | Digestive, Immune/Hematopoietic |
| HKIYE96 | Y19562 | WO9922243-A1 | Excretory |
| HLYAN59 | Y19563 | WO9922243-A1 | Immune/Hematopoietic |
| HNEEE24 | Y19564 | WO9922243-A1 | Immune/Hematopoietic |
| HAPRK85 | Y19565 | WO9922243-A1 | Cancer |
| HLTEJ06 | Y19566 | WO9922243-A1 | Immune/Hematopoietic |
| HMEKT48 | Y19567 | WO9922243-A1 | Cancer |
| HNGHR74 | Y19568 | WO9922243-A1 | Immune/Hematopoietic |
| HNHED17 | Y19569 | WO9922243-A1 | Immune/Hematopoietic |
| HNHEP59 | Y19570 | WO9922243-A1 | Immune/Hematopoietic |
| HNHFJ25 | Y19571 | WO9922243-A1 | Immune/Hematopoietic |
| HCPAA69 | Y19572 | WO9922243-A1 | Neural/Sensory |
| HEAAR07 | Y19573 | WO9922243-A1 | Reproductive |
| HHGDW43 | Y19574 | WO9922243-A1 | Cancer |
| HHSDX28 | Y19575 | WO9922243-A1 | Immune/Hematopoietic, Neural/Sensory |
| HE8ER60 | Y19576 | WO9922243-A1 | Cancer |
| HMEJQ66 | Y19577 | WO9922243-A1 | Cardiovascular |
| HRDAD66 | Y19578 | WO9922243-A1 | Cancer |
| HCMST14 | Y19579 | WO9922243-A1 | Cancer |
| HCEBA03 | Y19580 | WO9922243-A1 | Neural/Sensory |
| HJAAM10 | Y19582 | WO9922243-A1 | Cancer |
| HOHCC74 | Y19584 | WO9922243-A1 | Cancer |
| HPMFY57 | Y19585 | WO9922243-A1 | Immune/Hematopoietic, Neural/Sensory, |
| | | | Reproductive |
| HFXDN63 | Y19586 | WO9922243-A1 | Neural/Sensory |
| HADCL76 | Y19587 | WO9922243-A1 | Cancer |
| HMMAS76 | Y19588 | WO9922243-A1 | Endocrine, Immune/Hematopoietic |
| HMKCG09 | Y19589 | WO9922243-A1 | Digestive, Endocrine, Neural/Sensory |
| HFPBA88 | Y19590 | WO9922243-A1 | Cancer |
| HMIAH29 | Y19596 | WO9922243-A1 | Cancer |
| HEMFS60 | Y19757 | WO9922243-A1 | Cancer |
| HDPVA94 | Y25708 | WO9938882-A1 | Cancer |
| HDPNE25 | Y25709 | WO9938882-A1 | Cancer |
| HASCG84 | Y25711 | WO9938881-A1 | Cancer |
| HDPCY37 | Y25712 | WO9938881-A1 | Cancer |
| HHEBB10 | Y25713 | WO9938881-A1 | Cancer |
| HNGJA38 | Y25714 | WO9938881-A1 | Immune/Hematopoietic |
| HHENL07 | Y25715 | WO9938881-A1 | Immune/Hematopoietic |
| HKADQ91 | Y25716 | WO9938881-A1 | Cancer |
| HPMCV18 | Y25717 | WO9938881-A1 | Musculoskeletal, Reproductive |
| HKGAK22 | Y25718 | WO9938881-A1 | Endocrine, Excretory, Neural/Sensory |
| HTEHU31 | Y25719 | WO9938881-A1 | Cancer |
| HFXAM76 | Y25720 | WO9938881-A1 | Cancer |
| HFXDZ79 | Y25721 | WO9938881-A1 | Neural/Sensory |
| HOHBC68 | Y25722 | WO9938881-A1 | Cancer |
| HSVAM81 | Y25723 | WO9938881-A1 | Cancer |
| HTXDG40 | Y25724 | WO9938881-A1 | Immune/Hematopoietic |
| HE2FC81 | Y25725 | WO9938881-A1 | Mixed Fetal |
| HJACE05 | Y25726 | WO9938881-A1 | Cancer |
| HADCW30 | Y25727 | WO9938881-A1 | Connective/Epithelial |
| HBMDK25 | Y25728 | WO9938881-A1 | Immune/Hematopoietic |
| HFXKK25 | Y25729 | WO9938881-A1 | Cancer |
| HHEMO80 | Y25730 | WO9938881-A1 | Immune/Hematopoietic |
| HNGEJ53 | Y25731 | WO9938881-A1 | Immune/Hematopoietic |
| HTBAA70 | Y25732 | WO9938881-A1 | Connective/Epithelial, Immune/Hematopoietic, |
| | | | Reproductive |
| HSAYB43 | Y25734 | WO9938881-A1 | Immune/Hematopoietic |
| HSLDS32 | Y25735 | WO9938881-A1 | Cancer |
| HMIAV27 | Y25736 | WO9938881-A1 | Cancer |
| HSQEH50 | Y25737 | WO9938881-A1 | Cancer |
| HKMMU22 | Y25738 | WO9938881-A1 | Excretory |
| HKMMD13 | Y25739 | WO9938881-A1 | Excretory |
| HLDNK64 | Y25740 | WO9938881-A1 | Cancer |
| HRDES01 | Y25741 | WO9938881-A1 | Musculoskeletal |
| HDTDZ50 | Y25742 | WO9938881-A1 | Cancer |
| HETAB45 | Y25743 | WO9938881-A1 | Cancer |
| HFPBD47 | Y25744 | WO9938881-A1 | Cancer |
| HJMBI18 | Y25745 | WO9938881-A1 | Cancer |
| HFXHK73 | Y25746 | WO9938881-A1 | Neural/Sensory |
| HJMBT65 | Y25747 | WO9938881-A1 | Cancer |
| HWHGZ26 | Y25748 | WO9938881-A1 | Cancer |
| HADFY83 | Y25749 | WO9938881-A1 | Cancer |
| HBMTV78 | Y25750 | WO9938881-A1 | Digestive, Immune/Hematopoietic |
| HTXJM03 | Y25751 | WO9938881-A1 | Cancer |
| HUSAT94 | Y25752 | WO9938881-A1 | Cancer |
| HCUEN88 | Y25753 | WO9938881-A1 | Immune/Hematopoietic |
| HCE3F70 | Y25754 | WO9938881-A1 | Cancer |
| HCE5F43 | Y25755 | WO9938881-A1 | Cancer |
| HL2AC08 | Y25756 | WO9938881-A1 | Cancer |
| HCNSM70 | Y25757 | WO9938881-A1 | Cancer |
| HDPTQ73 | Y25758 | WO9938881-A1 | Cancer |
| HTODG13 | Y25759 | WO9938881-A1 | Digestive, Immune/Hematopoietic, Reproductive |
| HE8DR25 | Y25760 | WO9938881-A1 | Excretory, Mixed Fetal, Neural/Sensory |
| HSAAO65 | Y25761 | WO9938881-A1 | Cancer |
| HKGDE09 | Y25762 | WO9938881-A1 | Cancer |
| HMVBS69 | Y25763 | WO9938881-A1 | Cardiovascular, Immune/Hematopoietic |
| HSIDU42 | Y25764 | WO9938881-A1 | Cancer |
| HSKCT36 | Y25765 | WO9938881-A1 | Cancer |
| HSXBU59 | Y25766 | WO9938881-A1 | Immune/Hematopoietic, Neural/Sensory |
| HSSGG82 | Y25767 | WO9938881-A1 | Cancer |
| HE8CH92 | Y25768 | WO9938881-A1 | Cancer |
| HYBAR01 | Y25769 | WO9938881-A1 | Musculoskeletal |
| HTLEF73 | Y25770 | WO9938881-A1 | Cancer |
| HEOMW84 | Y25771 | WO9938881-A1 | Connective/Epithelial, Immune/Hematopoietic |
| HKGAR66 | Y25772 | WO9938881-A1 | Cancer |
| HHPDX20 | Y25773 | WO9938881-A1 | Neural/Sensory |
| HSICV24 | Y25774 | WO9938881-A1 | Cancer |
| HCWBE20 | Y25775 | WO9938881-A1 | Immune/Hematopoietic |
| HSXBM30 | Y25776 | WO9938881-A1 | Cancer |
| HDPCY37 | Y25778 | WO9938881-A1 | Cancer |
| HOSFQ65 | Y25791 | WO9938881-A1 | Cancer |
| HSXBH24 | Y25807 | WO9938881-A1 | Cancer |
| HUSIG64 | Y27567 | WO9924836-A1 | Cancer |
| HATCI78 | Y27568 | WO9924836-A1 | Endocrine |
| HSIDR70 | Y27569 | WO9924836-A1 | Digestive |
| HFADD53 | Y27570 | WO9924836-A1 | Excretory, Neural/Sensory |
| HPMGT51 | Y27571 | WO9924836-A1 | Immune/Hematopoietic, Reproductive |
| HFVAB79 | Y27572 | WO9924836-A1 | Cardiovascular, Digestive, Reproductive |
| HDTBP51 | Y27573 | WO9924836-A1 | Digestive, Immune/Hematopoietic, Reproductive |
| HLHFR19 | Y27574 | WO9924836-A1 | Neural/Sensory, Respiratory |
| HMEET96 | Y27575 | WO9924836-A1 | Cancer |
| HTXCV12 | Y27576 | WO9924836-A1 | Cancer |
| HCEFB70 | Y27577 | WO9924836-A1 | Immune/Hematopoietic, Neural/Sensory |
| HDTAV25 | Y27578 | WO9924836-A1 | Cancer |
| HSATA21 | Y27579 | WO9924836-A1 | Immune/Hematopoietic |
| HKIXI03 | Y27580 | WO9924836-A1 | Excretory |
| HDTDC56 | Y27581 | WO9924836-A1 | Cancer |
| HLTBF35 | Y27582 | WO9924836-A1 | Cancer |
| HEPAB80 | Y27583 | WO9924836-A1 | Reproductive |
| HFOXB13 | Y27584 | WO9924836-A1 | Musculoskeletal |
| HTOAK16 | Y27585 | WO9924836-A1 | Cardiovascular, Connective/Epithelial, |
| | | | Immune/Hematopoietic |
| HBXDC63 | Y27586 | WO9924836-A1 | Neural/Sensory |
| HASAU43 | Y27587 | WO9924836-A1 | Immune/Hematopoietic |
| HAGEA31 | Y27588 | WO9924836-A1 | Cancer |
| HTXHB33 | Y27590 | WO9924836-A1 | Immune/Hematopoietic |
| HMWFT65 | Y27591 | WO9924836-A1 | Immune/Hematopoietic |
| HNGAZ68 | Y27592 | WO9924836-A1 | Cardiovascular, Immune/Hematopoietic |
| HTWFH07 | Y27593 | WO9924836-A1 | Immune/Hematopoietic |
| HMQDF12 | Y27594 | WO9924836-A1 | Cancer |
| HFABH95 | Y27595 | WO9924836-A1 | Digestive, Neural/Sensory, Reproductive |
| HNGDD48 | Y27596 | WO9924836-A1 | Immune/Hematopoietic |
| HPMBY46 | Y27597 | WO9924836-A1 | Cancer |
| HRKPA09 | Y27598 | WO9924836-A1 | Cancer |
| HAGAQ26 | Y27599 | WO9924836-A1 | Cancer |
| HCWFL55 | Y27600 | WO9924836-A1 | Immune/Hematopoietic |
| HKAAE44 | Y27601 | WO9924836-A1 | Cancer |
| HNGEU90 | Y27602 | WO9924836-A1 | Immune/Hematopoietic |
| HCFCC07 | Y27603 | WO9924836-A1 | Digestive, Immune/Hematopoietic |
| HLWBI63 | Y27604 | WO9924836-A1 | Cancer |
| HDUAC77 | Y27605 | WO9924836-A1 | Immune/Hematopoietic, Mixed Fetal, |
| | | | Neural/Sensory |
| HFOYV27 | Y27606 | WO9924836-A1 | Cancer |
| HGBHI35 | Y27607 | WO9924836-A1 | Cancer |
| HRDEU27 | Y27608 | WO9924836-A1 | Musculoskeletal |
| HNGJE50 | Y27609 | WO9924836-A1 | Immune/Hematopoietic |
| HNHDU48 | Y27610 | WO9924836-A1 | Immune/Hematopoietic |
| HFXJU68 | Y27611 | WO9924836-A1 | Immune/Hematopoietic, Neural/Sensory |
| HMMAH60 | Y27612 | WO9924836-A1 | Immune/Hematopoietic |
| HNGFR31 | Y27613 | WO9924836-A1 | Immune/Hematopoietic |
| HFPDB26 | Y27614 | WO9924836-A1 | Immune/Hematopoietic, Neural/Sensory, |
| | | | Reproductive |
| HFRAW86 | Y27615 | WO9924836-A1 | Neural/Sensory |
| HTEDX90 | Y27616 | WO9924836-A1 | Reproductive |
| HTXGG45 | Y27617 | WO9924836-A1 | Immune/Hematopoietic |
| HTXJI95 | Y27618 | WO9924836-A1 | Immune/Hematopoietic, Reproductive |
| HLYBD32 | Y27619 | WO9924836-A1 | Immune/Hematopoietic |
| HROAJ03 | Y27621 | WO9924836-A1 | Cancer |
| HTXAJ12 | Y27622 | WO9924836-A1 | Immune/Hematopoietic |
| HKAEL80 | Y27623 | WO9924836-A1 | Connective/Epithelial, Immune/Hematopoietic |
| HNHFL04 | Y27624 | WO9924836-A1 | Immune/Hematopoietic |
| HPCAM01 | Y27625 | WO9924836-A1 | Cancer |
| HJACA79 | Y27626 | WO9924836-A1 | Immune/Hematopoietic |
| HMSFI26 | Y27628 | WO9924836-A1 | Immune/Hematopoietic |
| HMSJR08 | Y27629 | WO9924836-A1 | Immune/Hematopoietic |
| HMWIO93 | Y27630 | WO9924836-A1 | Cancer |
| HNGAK47 | Y27631 | WO9924836-A1 | Immune/Hematopoietic |
| HNGAL31 | Y27632 | WO9924836-A1 | Immune/Hematopoietic |
| HNGIZ06 | Y27633 | WO9924836-A1 | Immune/Hematopoietic |
| HNHBI75 | Y27634 | WO9924836-A1 | Immune/Hematopoietic |
| HOFNT24 | Y27635 | WO9924836-A1 | Reproductive |
| HSAXI95 | Y27636 | WO9924836-A1 | Immune/Hematopoietic |
| HCMTB45 | Y27637 | WO9924836-A1 | Cardiovascular, Immune/Hematopoietic, Mixed |
| | | | Fetal |
| HE9CP41 | Y27638 | WO9924836-A1 | Immune/Hematopoietic, Mixed Fetal |
| HHENV10 | Y27639 | WO9924836-A1 | Immune/Hematopoietic |
| HSKDD72 | Y27640 | WO9924836-A1 | Digestive, Musculoskeletal |
| HAGDO20 | Y27641 | WO9924836-A1 | Cancer |
| HCFBH15 | Y27642 | WO9924836-A1 | Immune/Hematopoietic |
| HSYBX48 | Y27643 | WO9924836-A1 | Cancer |
| HATDQ62 | Y27644 | WO9924836-A1 | Cancer |
| HMEJE13 | Y27645 | WO9924836-A1 | Cancer |
| HNAAF65 | Y27646 | WO9924836-A1 | Cancer |
| HNFHY30 | Y27647 | WO9924836-A1 | Immune/Hematopoietic |
| HNFIR81 | Y27648 | WO9924836-A1 | Cancer |
| HNTBI57 | Y27649 | WO9924836-A1 | Cancer |
| HSAYR13 | Y27650 | WO9924836-A1 | Immune/Hematopoietic |
| HTOHV49 | Y27651 | WO9924836-A1 | Immune/Hematopoietic |
| HSFAG37 | Y27652 | WO9924836-A1 | Cancer |
| HTXBU52 | Y27653 | WO9924836-A1 | Cancer |
| HLHFP18 | Y27654 | WO9924836-A1 | Cancer |
| HFXBW09 | Y27655 | WO9924836-A1 | Neural/Sensory |
| HNGIO59 | Y27656 | WO9924836-A1 | Immune/Hematopoietic |
| HNGJF92 | Y27657 | WO9924836-A1 | Immune/Hematopoietic |
| HMEED18 | Y27658 | WO9924836-A1 | Cancer |
| HMIAM45 | Y27659 | WO9924836-A1 | Neural/Sensory |
| HSAVK10 | Y27660 | WO9924836-A1 | Immune/Hematopoietic |
| HSDHC81 | Y27661 | WO9924836-A1 | Immune/Hematopoietic, Neural/Sensory |
| HSLCT04 | Y27662 | WO9924836-A1 | Mixed Fetal, Musculoskeletal |
| HMDAB56 | Y27663 | WO9924836-A1 | Immune/Hematopoietic, Neural/Sensory |
| HUDBZ89 | Y27664 | WO9924836-A1 | Cancer |
| HLYCT47 | Y27665 | WO9924836-A1 | Digestive, Immune/Hematopoietic |
| HOSDJ25 | Y27666 | WO9924836-A1 | Cancer |
| HADAO89 | Y27667 | WO9924836-A1 | Connective/Epithelial |
| HMSGB14 | Y27668 | WO9924836-A1 | Cancer |
| HPMGD01 | Y27669 | WO9924836-A1 | Cancer |
| HNHFU32 | Y27670 | WO9924836-A1 | Immune/Hematopoietic |
| HMIAL40 | Y27671 | WO9924836-A1 | Musculoskeletal, Neural/Sensory |
| HAMFY69 | Y27672 | WO9924836-A1 | Cancer |
| HBMCT17 | Y27673 | WO9924836-A1 | Immune/Hematopoietic, Neural/Sensory |
| HEBFI91 | Y27674 | WO9924836-A1 | Neural/Sensory |
| HHEAH86 | Y27675 | WO9924836-A1 | Cancer |
| HTPCS72 | Y27677 | WO9924836-A1 | Cancer |
| HFFAL36 | Y27678 | WO9924836-A1 | Neural/Sensory |
| HFXBT12 | Y27679 | WO9924836-A1 | Immune/Hematopoietic, Neural/Sensory |
| HNGJF70 | Y27680 | WO9924836-A1 | Immune/Hematopoietic |
| HATEE46 | Y27681 | WO9924836-A1 | Cancer |
| HJMBN89 | Y27682 | WO9924836-A1 | Cancer |
| HNHEK61 | Y27683 | WO9924836-A1 | Immune/Hematopoietic |
| HEQAO65 | Y27684 | WO9924836-A1 | Cancer |
| HFCDV54 | Y27685 | WO9924836-A1 | Cancer |
| HHEAD14 | Y27686 | WO9924836-A1 | Cancer |
| HGBHE57 | Y27687 | WO9924836-A1 | Cancer |
| HGLAF75 | Y27688 | WO9924836-A1 | Digestive, Immune/Hematopoietic, Reproductive |
| HHEMQ28 | Y27689 | WO9924836-A1 | Digestive, Immune/Hematopoietic, Neural/Sensory |
| HERAR44 | Y27691 | WO9924836-A1 | Connective/Epithelial, Reproductive |
| HYBAV65 | Y28640 | WO9940183-A1 | Immune/Hematopoietic, Musculoskeletal |
| HETBA38 | Y28643 | WO9940183-A1 | Digestive, Mixed Fetal, Reproductive |
| HCE1Q30 | Y30701 | WO9943693-A1 | Immune/Hematopoietic, Neural/Sensory |
| HAGBP70 | Y30702 | WO9943693-A1 | Cancer |
| HBCAY27 | Y30703 | WO9943693-A1 | Immune/Hematopoietic, Neural/Sensory |
| HCACU58 | Y30704 | WO9943693-A1 | Immune/Hematopoietic |
| HCWLD74 | Y30705 | WO9943693-A1 | Immune/Hematopoietic |
| HDPFP29 | Y30706 | WO9943693-A1 | Cancer |
| HDPPH47 | Y30707 | WO9943693-A1 | Cancer |
| HFEAN33 | Y30708 | WO9943693-A1 | Cancer |
| HFEAT91 | Y30709 | WO9943693-A1 | Connective/Epithelial, Reproductive |
| HFPAO71 | Y30710 | WO9943693-A1 | Cancer |
| HLWAA17 | Y30711 | WO9943693-A1 | Cancer |
| HLYCQ18 | Y30712 | WO9943693-A1 | Immune/Hematopoietic |
| HOSFG70 | Y30713 | WO9943693-A1 | Cancer |
| HSSAJ29 | Y30714 | WO9943693-A1 | Cancer |
| HUSIF44 | Y30715 | WO9943693-A1 | Cancer |
| H6EDX46 | Y30716 | WO9943693-A1 | Cancer |
| HABAG37 | Y30717 | WO9943693-A1 | Cancer |
| HACBD91 | Y30718 | WO9943693-A1 | Cancer |
| HADEH21 | Y30719 | WO9943693-A1 | Cancer |
| HAGHD57 | Y30720 | WO9943693-A1 | Cancer |
| HAGHR69 | Y30721 | WO9943693-A1 | Cancer |
| HAHDB16 | Y30722 | WO9943693-A1 | Cardiovascular |
| HAHDR32 | Y30723 | WO9943693-A1 | Cancer |
| HAJAW93 | Y30724 | WO9943693-A1 | Cancer |
| HAJBR69 | Y30725 | WO9943693-A1 | Connective/Epithelial, Immune/Hematopoietic, |
| | | | Musculoskeletal |
| HAMGO32 | Y30726 | WO9943693-A1 | Reproductive |
| HATBR65 | Y30727 | WO9943693-A1 | Cancer |
| HBJLD29 | Y30728 | WO9943693-A1 | Immune/Hematopoietic |
| HBJNB13 | Y30729 | WO9943693-A1 | Immune/Hematopoietic |
| HCE2F54 | Y30730 | WO9943693-A1 | Cancer |
| HCE3C52 | Y30731 | WO9943693-A1 | Cancer |
| HCEEA88 | Y30732 | WO9943693-A1 | Cancer |
| HCEFE96 | Y30733 | WO9943693-A1 | Cancer |
| HCEIF12 | Y30734 | WO9943693-A1 | Cancer |
| HCEOR67 | Y30735 | WO9943693-A1 | Neural/Sensory |
| HCEVB76 | Y30736 | WO9943693-A1 | Cancer |
| HNTOA17 | Y30737 | WO9943693-A1 | Cancer |
| HDPOW86 | Y30811 | WO9940100-A1 | Cancer |
| HSYAG26 | Y30812 | WO9940100-A1 | Cancer |
| HLHCH40 | Y30813 | WO9940100-A1 | Cancer |
| HPLBM85 | Y30814 | WO9940100-A1 | Cancer |
| HLMBO76 | Y30815 | WO9940100-A1 | Excretory, Immune/Hematopoietic, Reproductive |
| HLQDR48 | Y30816 | WO9940100-A1 | Digestive |
| HOHBY12 | Y30817 | WO9940100-A1 | Musculoskeletal |
| HOSEK86 | Y30818 | WO9940100-A1 | Cancer |
| HAJBZ75 | Y30819 | WO9940100-A1 | Cancer |
| HAGCH75 | Y30820 | WO9940100-A1 | Neural/Sensory |
| HE8MH91 | Y30821 | WO9940100-A1 | Cancer |
| HISCJ55 | Y30822 | WO9940100-A1 | Digestive |
| HKISB57 | Y30823 | WO9940100-A1 | Cancer |
| HTEBJ71 | Y30824 | WO9940100-A1 | Cancer |
| HCWGA40 | Y30825 | WO9940100-A1 | Cancer |
| HFCEW05 | Y30826 | WO9940100-A1 | Cardiovascular, Neural/Sensory |
| HCEPF19 | Y30827 | WO9940100-A1 | Cancer |
| HTACZ01 | Y30828 | WO9940100-A1 | Immune/Hematopoietic |
| HUDAM89 | Y30829 | WO9940100-A1 | Reproductive |
| HSAXF60 | Y30830 | WO9940100-A1 | Immune/Hematopoietic |
| HTOGR42 | Y30831 | WO9940100-A1 | Immune/Hematopoietic |
| HMVBN46 | Y30832 | WO9940100-A1 | Immune/Hematopoietic, Neural/Sensory |
| HUVEB53 | Y30833 | WO9940100-A1 | Cancer |
| HSVBU91 | Y30834 | WO9940100-A1 | Cancer |
| HTXFL30 | Y30835 | WO9940100-A1 | Cancer |
| HAGAM64 | Y30836 | WO9940100-A1 | Neural/Sensory |
| HE2PH36 | Y30837 | WO9940100-A1 | Digestive, Immune/Hematopoietic, Mixed Fetal |
| HGBDY06 | Y30838 | WO9940100-A1 | Cancer |
| HWBAO62 | Y30839 | WO9940100-A1 | Connective/Epithelial, Immune/Hematopoietic |
| HBAFJ33 | Y30840 | WO9940100-A1 | Cancer |
| HFXDJ75 | Y30841 | WO9940100-A1 | Neural/Sensory |
| HFPCY04 | Y30842 | WO9940100-A1 | Neural/Sensory |
| HSNBG78 | Y30843 | WO9940100-A1 | Connective/Epithelial, Digestive, |
| | | | Immune/Hematopoietic |
| HBQAB27 | Y30844 | WO9940100-A1 | Endocrine, Neural/Sensory |
| HTOJY21 | Y30845 | WO9940100-A1 | Cancer |
| HHTMM30 | Y30846 | WO9940100-A1 | Cancer |
| HLTAF58 | Y30847 | WO9940100-A1 | Digestive, Immune/Hematopoietic |
| HELFG13 | Y30848 | WO9940100-A1 | Cancer |
| HHFDM48 | Y30849 | WO9940100-A1 | Cardiovascular, Neural/Sensory, Reproductive |
| HKABI84 | Y30850 | WO9940100-A1 | Cancer |
| HMVAX72 | Y30851 | WO9940100-A1 | Cancer |
| HODDN60 | Y30852 | WO9940100-A1 | Cancer |
| HPMEI44 | Y30853 | WO9940100-A1 | Cancer |
| HNGJP69 | Y30854 | WO9940100-A1 | Immune/Hematopoietic |
| HPWBA10 | Y30855 | WO9940100-A1 | Immune/Hematopoietic, Reproductive |
| HLHCH40 | Y30856 | WO9940100-A1 | Cancer |
| HTACZ01 | Y30857 | WO9940100-A1 | Immune/Hematopoietic |
| HTOGR42 | Y30858 | WO9940100-A1 | Immune/Hematopoietic |
| HTAEK53 | Y31811 | WO9947538-A1 | Cancer |
| HFCCQ50 | Y36224 | WO9931117-A1 | Cancer |
| HTLAI54 | Y36225 | WO9931117-A1 | Reproductive |
| HLWBF94 | Y36227 | WO9931117-A1 | Endocrine, Neural/Sensory, Reproductive |
| HFKFF78 | Y36228 | WO9931117-A1 | Excretory |
| HSYBG37 | Y36229 | WO9931117-A1 | Cancer |
| HTHCA77 | Y36230 | WO9931117-A1 | Immune/Hematopoietic |
| HNHEZ51 | Y36231 | WO9931117-A1 | Immune/Hematopoietic |
| HFIAX46 | Y36232 | WO9931117-A1 | Cardiovascular, Musculoskeletal |
| HFOXO72 | Y36233 | WO9931117-A1 | Cancer |
| HODDW40 | Y36234 | WO9931117-A1 | Cardiovascular, Immune/Hematopoietic, |
| | | | Reproductive |
| HSAWG42 | Y36235 | WO9931117-A1 | Immune/Hematopoietic |
| HBMSK09 | Y36236 | WO9931117-A1 | Digestive, Immune/Hematopoietic, |
| | | | Musculoskeletal |
| HDPAU16 | Y36237 | WO9931117-A1 | Cancer |
| HFEBE12 | Y36238 | WO9931117-A1 | Cancer |
| HFLNB64 | Y36239 | WO9931117-A1 | Cancer |
| HSAWZ41 | Y36240 | WO9931117-A1 | Immune/Hematopoietic |
| HNFJF07 | Y36241 | WO9931117-A1 | Immune/Hematopoietic, Neural/Sensory |
| HNGJO57 | Y36242 | WO9931117-A1 | Immune/Hematopoietic |
| HE7TM22 | Y36243 | WO9931117-A1 | Mixed Fetal |
| HFRBR70 | Y36244 | WO9931117-A1 | Cancer |
| HTHBK35 | Y36245 | WO9931117-A1 | Immune/Hematopoietic |
| HWABA81 | Y36246 | WO9931117-A1 | Immune/Hematopoietic |
| HKGAA73 | Y36247 | WO9931117-A1 | Cancer |
| HKIYP40 | Y36248 | WO9931117-A1 | Cancer |
| HKMMW74 | Y36249 | WO9931117-A1 | Excretory |
| HLFBI27 | Y36250 | WO9931117-A1 | Respiratory |
| HLQCW84 | Y36251 | WO9931117-A1 | Digestive |
| HBNAV22 | Y36252 | WO9931117-A1 | Digestive, Reproductive |
| HTEAM34 | Y36253 | WO9931117-A1 | Reproductive |
| HTHDK34 | Y36254 | WO9931117-A1 | Digestive, Immune/Hematopoietic |
| H6BSG32 | Y36255 | WO9931117-A1 | Cardiovascular, Immune/Hematopoietic, |
| | | | Musculoskeletal |
| HAECA01 | Y36256 | WO9931117-A1 | Cancer |
| HDTEL03 | Y36257 | WO9931117-A1 | Cancer |
| HFXDT43 | Y36258 | WO9931117-A1 | Neural/Sensory |
| HNGHQ09 | Y36259 | WO9931117-A1 | Immune/Hematopoietic |
| HHGDF16 | Y36260 | WO9931117-A1 | Cancer |
| HJBCG12 | Y36261 | WO9931117-A1 | Cancer |
| HOGAW62 | Y36262 | WO9931117-A1 | Immune/Hematopoietic, Reproductive |
| HSWBJ74 | Y36263 | WO9931117-A1 | Cancer |
| HGBHR26 | Y36264 | WO9931117-A1 | Digestive |
| HKDBF34 | Y36265 | WO9931117-A1 | Cancer |
| H6EAB28 | Y36266 | WO9931117-A1 | Cancer |
| HLWAO22 | Y36267 | WO9931117-A1 | Cancer |
| HAGFH53 | Y36268 | WO9931117-A1 | Cancer |
| HHENQ22 | Y36269 | WO9931117-A1 | Immune/Hematopoietic |
| HKMLK53 | Y36270 | WO9931117-A1 | Excretory, Mixed Fetal |
| HSKGQ58 | Y36271 | WO9931117-A1 | Cancer |
| HADXB45 | Y36272 | WO9931117-A1 | Cancer |
| HAIBZ39 | Y36273 | WO9931117-A1 | Cancer |
| HBXFP23 | Y36274 | WO9931117-A1 | Cancer |
| HEQBF32 | Y36275 | WO9931117-A1 | Cancer |
| HETHE81 | Y36276 | WO9931117-A1 | Cancer |
| HFPAC12 | Y36277 | WO9931117-A1 | Cancer |
| H6EFA77 | Y36278 | WO9931117-A1 | Cancer |
| HFXHD88 | Y36279 | WO9931117-A1 | Neural/Sensory |
| HFOXV65 | Y36280 | WO9931117-A1 | Immune/Hematopoietic, Musculoskeletal, |
| | | | Reproductive |
| HKADX21 | Y36281 | WO9931117-A1 | Cancer |
| HPZAB47 | Y36282 | WO9931117-A1 | Cancer |
| HAGFE79 | Y36283 | WO9931117-A1 | Cancer |
| HCE1X60 | Y36284 | WO9931117-A1 | Neural/Sensory |
| HFXKD36 | Y36285 | WO9931117-A1 | Digestive, Musculoskeletal, Neural/Sensory |
| HBMCU71 | Y36286 | WO9931117-A1 | Immune/Hematopoietic |
| HTEIV80 | Y36287 | WO9931117-A1 | Reproductive |
| HFIAP16 | Y36288 | WO9931117-A1 | Musculoskeletal |
| HODAV86 | Y36289 | WO9931117-A1 | Reproductive |
| HTEDF80 | Y36290 | WO9931117-A1 | Reproductive |
| HTODJ69 | Y36291 | WO9931117-A1 | Immune/Hematopoietic |
| HE6GR02 | Y36292 | WO9931117-A1 | Immune/Hematopoietic, Mixed Fetal |
| HAPNY86 | Y36293 | WO9931117-A1 | Cancer |
| HTLDR33 | Y36294 | WO9931117-A1 | Immune/Hematopoietic, Reproductive |
| HACBI61 | Y36295 | WO9931117-A1 | Cancer |
| HMEIK34 | Y36296 | WO9931117-A1 | Cancer |
| HKAAK02 | Y36297 | WO9931117-A1 | Cancer |
| HEPAA46 | Y36298 | WO9931117-A1 | Reproductive |
| HFPCX09 | Y36299 | WO9931117-A1 | Mixed Fetal, Neural/Sensory |
| HLWAA88 | Y36300 | WO9931117-A1 | Cancer |
| HOHBV89 | Y36301 | WO9931117-A1 | Musculoskeletal, Reproductive |
| HCEFL57 | Y36302 | WO9931117-A1 | Cancer |
| HMEKU83 | Y36303 | WO9931117-A1 | Cardiovascular, Immune/Hematopoietic, |
| | | | Reproductive |
| HOSBY40 | Y36304 | WO9931117-A1 | Digestive, Immune/Hematopoietic, |
| | | | Musculoskeletal |
| HKFBH93 | Y36305 | WO9931117-A1 | Digestive, Reproductive |
| HMTAD67 | Y36306 | WO9931117-A1 | Cancer |
| HTEBP77 | Y36307 | WO9931117-A1 | Immune/Hematopoietic, Reproductive |
| HE9CO69 | Y36308 | WO9931117-A1 | Cancer |
| HCACV51 | Y36309 | WO9931117-A1 | Cancer |
| HHPBI45 | Y36310 | WO9931117-A1 | Cardiovascular, Neural/Sensory |
| HLQDH79 | Y36311 | WO9931117-A1 | Cancer |
| HNGFJ67 | Y36312 | WO9931117-A1 | Immune/Hematopoietic |
| HEIAC52 | Y36313 | WO9931117-A1 | Cancer |
| HFXKL58 | Y36314 | WO9931117-A1 | Cancer |
| HMVAM60 | Y36315 | WO9931117-A1 | Cancer |
| HMVBR22 | Y36316 | WO9931117-A1 | Cancer |
| HPJCW04 | Y36317 | WO9931117-A1 | Reproductive |
| HSIDJ81 | Y36318 | WO9931117-A1 | Digestive |
| HSLFU05 | Y36319 | WO9931117-A1 | Cancer |
| HEQAK71 | Y36320 | WO9931117-A1 | Cancer |
| HOSEQ49 | Y36321 | WO9931117-A1 | Cancer |
| HRAAM50 | Y36322 | WO9931117-A1 | Excretory, Immune/Hematopoietic, Mixed Fetal |
| HSDFW45 | Y36323 | WO9931117-A1 | Neural/Sensory |
| HSLCQ82 | Y36324 | WO9931117-A1 | Cancer |
| HSSFT08 | Y36325 | WO9931117-A1 | Musculoskeletal |
| HTOIW31 | Y36326 | WO9931117-A1 | Immune/Hematopoietic, Neural/Sensory, |
| | | | Reproductive |
| HTXKQ85 | Y36327 | WO9931117-A1 | Immune/Hematopoietic, Musculoskeletal, |
| | | | Reproductive |
| HUFBK08 | Y36328 | WO9931117-A1 | Digestive, Musculoskeletal |
| HBJEE48 | Y36330 | WO9931117-A1 | Cancer |
| HBXGH74 | Y36331 | WO9931117-A1 | Neural/Sensory |
| HISBM03 | Y36332 | WO9931117-A1 | Cancer |
| HETCH46 | Y36333 | WO9931117-A1 | Cancer |
| HFPCX09 | Y36335 | WO9931117-A1 | Mixed Fetal, Neural/Sensory |
| HLWAA88 | Y36336 | WO9931117-A1 | Cancer |
| HCEFL57 | Y36337 | WO9931117-A1 | Cancer |
| HETHE81 | Y36650 | WO9931117-A1 | Cancer |
| HTGAU75 | Y38386 | WO9935158-A1 | Immune/Hematopoietic |
| HTTDP47 | Y38387 | WO9935158-A1 | Cancer |
| HTXJQ11 | Y38388 | WO9935158-A1 | Cancer |
| HADCO45 | Y38389 | WO9935158-A1 | Cancer |
| HMIAL37 | Y38390 | WO9935158-A1 | Cancer |
| HNGDU40 | Y38391 | WO9935158-A1 | Immune/Hematopoietic |
| HFXBO84 | Y38392 | WO9935158-A1 | Neural/Sensory |
| HLLAX19 | Y38393 | WO9935158-A1 | Cancer |
| HPMAG94 | Y38394 | WO9935158-A1 | Cancer |
| HSVAK93 | Y38395 | WO9935158-A1 | Cancer |
| HMQBO88 | Y38396 | WO9935158-A1 | Cancer |
| HMQBU45 | Y38397 | WO9935158-A1 | Immune/Hematopoietic |
| HMWAJ53 | Y38398 | WO9935158-A1 | Immune/Hematopoietic |
| HCUGO12 | Y38401 | WO9935158-A1 | Digestive, Immune/Hematopoietic, Mixed Fetal |
| HPFCX44 | Y38402 | WO9935158-A1 | Cancer |
| HCUBV79 | Y38403 | WO9935158-A1 | Immune/Hematopoietic, Neural/Sensory |
| HLQBV04 | Y38404 | WO9935158-A1 | Cancer |
| HMADW66 | Y38405 | WO9935158-A1 | Cancer |
| HLDBE54 | Y38406 | WO9935158-A1 | Digestive, Reproductive |
| HFTAB66 | Y38407 | WO9935158-A1 | Digestive, Neural/Sensory |
| HEOMQ63 | Y38408 | WO9935158-A1 | Digestive, Immune/Hematopoietic |
| HDPJM30 | Y38409 | WO9935158-A1 | Immune/Hematopoietic, Neural/Sensory |
| HCFMG62 | Y38410 | WO9935158-A1 | Cancer |
| HJMAG88 | Y38411 | WO9935158-A1 | Cancer |
| HKAAH36 | Y38412 | WO9935158-A1 | Connective/Epithelial, Reproductive |
| HMADS41 | Y38413 | WO9935158-A1 | Cancer |
| HMEFT85 | Y38414 | WO9935158-A1 | Cancer |
| HMSBX80 | Y38415 | WO9935158-A1 | Immune/Hematopoietic, Reproductive |
| HNGCL23 | Y38416 | WO9935158-A1 | Immune/Hematopoietic |
| HPIBO15 | Y38418 | WO9935158-A1 | Cancer |
| HCYBG92 | Y38419 | WO9935158-A1 | Cancer |
| HMDAQ29 | Y38420 | WO9935158-A1 | Neural/Sensory, Reproductive |
| HSYBI49 | Y38421 | WO9935158-A1 | Cancer |
| HDTAB58 | Y38422 | WO9935158-A1 | Cancer |
| HFTAB66 | Y38423 | WO9935158-A1 | Digestive, Neural/Sensory |
| HDPBX23 | Y38424 | WO9935158-A1 | Immune/Hematopoietic, Neural/Sensory |
| HCFMG62 | Y38425 | WO9935158-A1 | Cancer |
| HKAAH36 | Y38426 | WO9935158-A1 | Connective/Epithelial, Reproductive |
| HKAAH36 | Y38427 | WO9935158-A1 | Connective/Epithelial, Reproductive |
| HMADS41 | Y38428 | WO9935158-A1 | Cancer |
| HNTBI26 | Y38429 | WO9935158-A1 | Cancer |
| HCYBI36 | Y38430 | WO9935158-A1 | Cancer |
| HTHBJ48 | Y41161 | US5981231-A | Digestive, Immune/Hematopoietic |
| HDQAC88 | Y41164 | US5981230-A | Cancer |
| HKGCR51 | Y41308 | WO9947540-A1 | Immune/Hematopoietic, Mixed Fetal, |
| | | | Neural/Sensory |
| HPMDK28 | Y41309 | WO9947540-A1 | Cancer |
| HLDCD04 | Y41310 | WO9947540-A1 | Cancer |
| HLDON23 | Y41311 | WO9947540-A1 | Cancer |
| HLDRM43 | Y41312 | WO9947540-A1 | Digestive, Reproductive |
| HLQAM28 | Y41313 | WO9947540-A1 | Digestive, Reproductive |
| HLTDE74 | Y41314 | WO9947540-A1 | Cancer |
| HLTFA64 | Y41315 | WO9947540-A1 | Cancer |
| HMCFY13 | Y41316 | WO9947540-A1 | Immune/Hematopoietic |
| HMMBD35 | Y41317 | WO9947540-A1 | Cancer |
| HMQCY03 | Y41318 | WO9947540-A1 | Digestive, Immune/Hematopoietic |
| HMSBX84 | Y41319 | WO9947540-A1 | Immune/Hematopoietic |
| HMSKI86 | Y41320 | WO9947540-A1 | Cancer |
| HMVBS81 | Y41321 | WO9947540-A1 | Cancer |
| HMWEB02 | Y41322 | WO9947540-A1 | Cancer |
| HMZAD77 | Y41323 | WO9947540-A1 | Cancer |
| HNFIY77 | Y41324 | WO9947540-A1 | Cancer |
| HNHEK85 | Y41325 | WO9947540-A1 | Immune/Hematopoietic, Mixed Fetal |
| HNHEU93 | Y41326 | WO9947540-A1 | Immune/Hematopoietic |
| HODAH74 | Y41327 | WO9947540-A1 | Connective/Epithelial, Reproductive, Respiratory |
| HODCU34 | Y41328 | WO9947540-A1 | Cancer |
| HODCZ09 | Y41329 | WO9947540-A1 | Reproductive |
| HISCF16 | Y41330 | WO9947540-A1 | Cancer |
| HOGAG15 | Y41331 | WO9947540-A1 | Cancer |
| HPIBO48 | Y41332 | WO9947540-A1 | Cancer |
| HPMFP40 | Y41333 | WO9947540-A1 | Reproductive |
| HPRCU95 | Y41334 | WO9947540-A1 | Musculoskeletal, Reproductive |
| HPTTG19 | Y41335 | WO9947540-A1 | Endocrine, Immune/Hematopoietic |
| HRDDV47 | Y41337 | WO9947540-A1 | Cancer |
| HRDEN56 | Y41338 | WO9947540-A1 | Musculoskeletal |
| HSFAN12 | Y41339 | WO9947540-A1 | Cardiovascular |
| HSQCM10 | Y41340 | WO9947540-A1 | Cancer |
| HSVAT68 | Y41341 | WO9947540-A1 | Excretory, Reproductive |
| HSXEC75 | Y41342 | WO9947540-A1 | Cancer |
| HTDAI54 | Y41343 | WO9947540-A1 | Cancer |
| HTEIT45 | Y41344 | WO9947540-A1 | Reproductive |
| HTGBE48 | Y41345 | WO9947540-A1 | Immune/Hematopoietic, Reproductive |
| HTLEP53 | Y41346 | WO9947540-A1 | Neural/Sensory, Reproductive |
| HTTBI76 | Y41347 | WO9947540-A1 | Cancer |
| HTWKG71 | Y41348 | WO9947540-A1 | Immune/Hematopoietic |
| HTXDN32 | Y41349 | WO9947540-A1 | Cancer |
| HTSGX80 | Y41350 | WO9947540-A1 | Cancer |
| HTXEY51 | Y41351 | WO9947540-A1 | Endocrine, Immune/Hematopoietic, Mixed Fetal |
| HTXFH55 | Y41352 | WO9947540-A1 | Cardiovascular, Immune/Hematopoietic |
| HTXJW17 | Y41353 | WO9947540-A1 | Digestive, Immune/Hematopoietic |
| HUFCJ30 | Y41354 | WO9947540-A1 | Cancer |
| HWAAP70 | Y41355 | WO9947540-A1 | Immune/Hematopoietic |
| HWABW49 | Y41356 | WO9947540-A1 | Immune/Hematopoietic |
| HWBDP28 | Y41357 | WO9947540-A1 | Cancer |
| HWDAC39 | Y41358 | WO9947540-A1 | Connective/Epithelial |
| HWHGQ49 | Y41359 | WO9947540-A1 | Cancer |
| HJPAD75 | Y41360 | WO9947540-A1 | Cancer |
| HLDRP33 | Y41361 | WO9947540-A1 | Digestive, Neural/Sensory |
| HMSIE02 | Y41362 | WO9947540-A1 | Cancer |
| HNGFE55 | Y41363 | WO9947540-A1 | Immune/Hematopoietic |
| HRAAJ19 | Y41365 | WO9947540-A1 | Cancer |
| HSAWV96 | Y41366 | WO9947540-A1 | Immune/Hematopoietic, Neural/Sensory |
| HSBBT37 | Y41367 | WO9947540-A1 | Cancer |
| HSDZR57 | Y41368 | WO9947540-A1 | Cancer |
| HCECQ07 | Y41369 | WO9947540-A1 | Cancer |
| HWBCP79 | Y41370 | WO9947540-A1 | Immune/Hematopoietic, Reproductive |
| HYAAL70 | Y41371 | WO9947540-A1 | Cancer |
| HYAAY86 | Y41372 | WO9947540-A1 | Immune/Hematopoietic |
| HAPBS03 | Y41373 | WO9947540-A1 | Cancer |
| HBJLC01 | Y41374 | WO9947540-A1 | Immune/Hematopoietic |
| HBLKD56 | Y41375 | WO9947540-A1 | Musculoskeletal |
| HCENK38 | Y41376 | WO9947540-A1 | Cancer |
| HE6GA29 | Y41379 | WO9947540-A1 | Mixed Fetal |
| HETHO95 | Y41381 | WO9947540-A1 | Digestive, Reproductive |
| HFCFJ18 | Y41382 | WO9947540-A1 | Cancer |
| HFPBM30 | Y41383 | WO9947540-A1 | Neural/Sensory |
| HFXKT05 | Y41384 | WO9947540-A1 | Cancer |
| HKB1E57 | Y41385 | WO9947540-A1 | Cancer |
| HLWAD77 | Y41386 | WO9947540-A1 | Cancer |
| HLWAY54 | Y41387 | WO9947540-A1 | Immune/Hematopoietic, Neural/Sensory, |
| | | | Reproductive |
| HNGBU28 | Y41388 | WO9947540-A1 | Immune/Hematopoietic |
| HOUHH51 | Y41389 | WO9947540-A1 | Cancer |
| HRAAB15 | Y41390 | WO9947540-A1 | Digestive, Excretory |
| HSAVH65 | Y41391 | WO9947540-A1 | Digestive, Immune/Hematopoietic, Reproductive |
| HSDGN55 | Y41392 | WO9947540-A1 | Cancer |
| HSXAH81 | Y41393 | WO9947540-A1 | Cancer |
| HSXBX80 | Y41394 | WO9947540-A1 | Cancer |
| HTEHV08 | Y41395 | WO9947540-A1 | Cancer |
| HUFAK67 | Y41396 | WO9947540-A1 | Digestive, Immune/Hematopoietic, Reproductive |
| HUSXS50 | Y41397 | WO9947540-A1 | Cancer |
| HAPON17 | Y41398 | WO9947540-A1 | Cancer |
| HATAC53 | Y41399 | WO9947540-A1 | Cancer |
| HAMFK58 | Y41400 | WO9947540-A1 | Cancer |
| HLYCH68 | Y41401 | WO9947540-A1 | Cancer |
| HCUHK65 | Y41402 | WO9947540-A1 | Cancer |
| HLDCD04 | Y41403 | WO9947540-A1 | Cancer |
| HOUHH51 | Y41404 | WO9947540-A1 | Cancer |
| HSLCQ82 | Y41571 | WO9947540-A1 | Cancer |
| HCGMD59 | Y45257 | WO9946289-A1 | Cancer |
| HCNSD76 | Y45258 | WO9946289-A1 | Digestive |
| HCNSD93 | Y45259 | WO9946289-A1 | Digestive |
| HCWBE22 | Y45260 | WO9946289-A1 | Immune/Hematopoietic, Neural/Sensory |
| HFEAN33 | Y45261 | WO9946289-A1 | Cancer |
| HCWUM50 | Y45262 | WO9946289-A1 | Cancer |
| HDHIA94 | Y45263 | WO9946289-A1 | Excretory, Neural/Sensory |
| HDPAE76 | Y45264 | WO9946289-A1 | Cancer |
| HDPIO54 | Y45265 | WO9946289-A1 | Immune/Hematopoietic, Reproductive |
| HDPNC61 | Y45266 | WO9946289-A1 | Cancer |
| HDPND46 | Y45267 | WO9946289-A1 | Immune/Hematopoietic |
| HDPSU13 | Y45268 | WO9946289-A1 | Immune/Hematopoietic |
| HDTGC73 | Y45269 | WO9946289-A1 | Cancer |
| HE2PD49 | Y45270 | WO9946289-A1 | Cancer |
| HEEAJ02 | Y45271 | WO9946289-A1 | Cancer |
| HELHD64 | Y45272 | WO9946289-A1 | Cancer |
| HEPAD91 | Y45273 | WO9946289-A1 | Digestive, Reproductive |
| HEQBH65 | Y45274 | WO9946289-A1 | Immune/Hematopoietic, Reproductive |
| HETCO02 | Y45275 | WO9946289-A1 | Cancer |
| HFAUO78 | Y45276 | WO9946289-A1 | Cancer |
| HFKEE48 | Y45277 | WO9946289-A1 | Cancer |
| HFKFG02 | Y45278 | WO9946289-A1 | Excretory, Immune/Hematopoietic, Neural/Sensory |
| H2CBN14 | Y45279 | WO9946289-A1 | Cancer |
| HHFFJ48 | Y45280 | WO9946289-A1 | Cardiovascular, Immune/Hematopoietic |
| HILCF66 | Y45281 | WO9946289-A1 | Cancer |
| HKABN45 | Y45282 | WO9946289-A1 | Cancer |
| HKDBK22 | Y45284 | WO9946289-A1 | Excretory |
| HKGAZ06 | Y45286 | WO9946289-A1 | Immune/Hematopoietic |
| HKGCK61 | Y45287 | WO9946289-A1 | Cancer |
| HFEAN33 | Y45288 | WO9946289-A1 | Cancer |
| HDHIA94 | Y45289 | WO9946289-A1 | Excretory, Neural/Sensory |
| HDPJO39 | Y52479 | WO9940184-A1 | Cancer |
| HNTCF82 | Y58185 | US6004780-A | Cardiovascular, Connective/Epithelial, |
| | | | Reproductive |
| HETAB62 | Y59285 | WO200004183-A1 | Cancer |
| HSYAE36 | Y59286 | WO200004183-A1 | Cancer |
| HKAPI15 | Y68800 | WO200005371-A1 | Connective/Epithelial |
| HUJCT9C | Y72090 | WO200068247-A2 | Cancer |
| HMGBM65 | Y72091 | WO200068247-A2 | Cancer |
| HATEE38 | Y72092 | WO200068247-A2 | Cancer |
| HCHAK72 | Y72093 | WO200068247-A2 | Cancer |
| HHFBJ67 | Y72094 | WO200068247-A2 | Cardiovascular, Neural/Sensory |
| HTTJK5C | Y72095 | WO200068247-A2 | Cancer |
| HWLGJ11 | Y72096 | WO200068247-A2 | Digestive |
| HTLEG15 | Y72097 | WO200068247-A2 | Cancer |
| HAGAS16 | Y72098 | WO200068247-A2 | Neural/Sensory |
| HATEE38 | Y72108 | WO200068247-A2 | Cancer |
| HKABZ65 | Y76124 | WO9958660-A1 | Connective/Epithelial |
| HNGIC80 | Y76125 | WO9958660-A1 | Immune/Hematopoietic |
| HDPUG50 | Y76126 | WO9958660-A1 | Cancer |
| HAEAB66 | Y76127 | WO9958660-A1 | Cancer |
| HHEPF59 | Y76128 | WO9958660-A1 | Cancer |
| HE9BK23 | Y76129 | WO9958660-A1 | Digestive, Mixed Fetal |
| HCYBI36 | Y76130 | WO9958660-A1 | Cancer |
| HSSDX51 | Y76131 | WO9958660-A1 | Cancer |
| HSDAJ46 | Y76132 | WO9958660-A1 | Cancer |
| HRACG45 | Y76133 | WO9958660-A1 | Cancer |
| HAPPW30 | Y76134 | WO9958660-A1 | Cancer |
| HE2ES51 | Y76135 | WO9958660-A1 | Cancer |
| HTXDW56 | Y76136 | WO9958660-A1 | Cancer |
| HDPKI93 | Y76138 | WO9958660-A1 | Cancer |
| HDLAC10 | Y76139 | WO9958660-A1 | Cancer |
| HDPOH06 | Y76140 | WO9958660-A1 | Cancer |
| HCE4G61 | Y76141 | WO9958660-A1 | Cancer |
| HCWUI13 | Y76142 | WO9958660-A1 | Immune/Hematopoietic |
| HDPSP01 | Y76143 | WO9958660-A1 | Cancer |
| HHPEN62 | Y76144 | WO9958660-A1 | Cancer |
| HUKBT29 | Y76145 | WO9958660-A1 | Cancer |
| HARAP48 | Y76146 | WO9958660-A1 | Cancer |
| HBIMB51 | Y76147 | WO9958660-A1 | Connective/Epithelial, Reproductive |
| HE8DX88 | Y76148 | WO9958660-A1 | Mixed Fetal |
| HNGHT03 | Y76149 | WO9958660-A1 | Immune/Hematopoietic |
| HWABU17 | Y76150 | WO9958660-A1 | Cancer |
| HCE5F84 | Y76151 | WO9958660-A1 | Cancer |
| HBXCD55 | Y76152 | WO9958660-A1 | Cancer |
| HOVCB25 | Y76153 | WO9958660-A1 | Reproductive |
| HSYAV66 | Y76154 | WO9958660-A1 | Digestive, Immune/Hematopoietic |
| HFPCT29 | Y76155 | WO9958660-A1 | Neural/Sensory |
| HAWAT25 | Y76156 | WO9958660-A1 | Cancer |
| HNHFR04 | Y76157 | WO9958660-A1 | Immune/Hematopoietic |
| HOSFT61 | Y76158 | WO9958660-A1 | Cancer |
| HBJIO81 | Y76159 | WO9958660-A1 | Immune/Hematopoietic |
| HADCL55 | Y76160 | WO9958660-A1 | Cancer |
| HAGGJ80 | Y76161 | WO9958660-A1 | Cancer |
| HAIBO81 | Y76162 | WO9958660-A1 | Neural/Sensory |
| HBBBC37 | Y76163 | WO9958660-A1 | Cancer |
| HBJMX85 | Y76164 | WO9958660-A1 | Cancer |
| HCEES66 | Y76165 | WO9958660-A1 | Digestive, Neural/Sensory |
| HCEMP62 | Y76166 | WO9958660-A1 | Cancer |
| HE2FB90 | Y76167 | WO9958660-A1 | Cancer |
| HE9DS56 | Y76168 | WO9958660-A1 | Cancer |
| HTOHJ89 | Y76169 | WO9958660-A1 | Immune/Hematopoietic |
| HASCE69 | Y76171 | WO9958660-A1 | Cancer |
| HHTLH52 | Y76172 | WO9958660-A1 | Neural/Sensory, Reproductive |
| HOUCT90 | Y76174 | WO9958660-A1 | Connective/Epithelial |
| HCFLR78 | Y76175 | WO9958660-A1 | Cancer |
| HTOHT18 | Y76176 | WO9958660-A1 | Cancer |
| HKPMB11 | Y76177 | WO9958660-A1 | Digestive, Excretory, Musculoskeletal |
| HNFHS38 | Y76178 | WO9958660-A1 | Cancer |
| HAIBU10 | Y76179 | WO9958660-A1 | Cancer |
| HAPOK30 | Y76180 | WO9958660-A1 | Cancer |
| HCWUA22 | Y76182 | WO9958660-A1 | Immune/Hematopoietic |
| HDSAG91 | Y76183 | WO9958660-A1 | Immune/Hematopoietic |
| HNEDJ35 | Y76184 | WO9958660-A1 | Immune/Hematopoietic, Reproductive |
| HTHBH29 | Y76185 | WO9958660-A1 | Immune/Hematopoietic, Mixed Fetal, Reproductive |
| H7TBA62 | Y76186 | WO9958660-A1 | Cancer |
| HNGIO50 | Y76187 | WO9958660-A1 | Immune/Hematopoietic |
| HMIAW81 | Y76188 | WO9958660-A1 | Immune/Hematopoietic, Neural/Sensory, |
| | | | Reproductive |
| HMMCJ60 | Y76189 | WO9958660-A1 | Immune/Hematopoietic, Musculoskeletal |
| HDPIO09 | Y76190 | WO9958660-A1 | Cancer |
| HHFHH34 | Y76191 | WO9958660-A1 | Cardiovascular |
| HISCL83 | Y76192 | WO9958660-A1 | Digestive |
| HTOAI70 | Y76193 | WO9958660-A1 | Immune/Hematopoietic |
| HSDER95 | Y76194 | WO9958660-A1 | Digestive, Neural/Sensory |
| HNECL25 | Y76195 | WO9958660-A1 | Immune/Hematopoietic |
| HNFGZ45 | Y76196 | WO9958660-A1 | Cardiovascular, Digestive, Immune/Hematopoietic |
| HHGCU49 | Y76197 | WO9958660-A1 | Cancer |
| HETDT81 | Y76199 | WO9958660-A1 | Digestive, Immune/Hematopoietic, Reproductive |
| HHLBA14 | Y76200 | WO9958660-A1 | Cancer |
| HLTBU43 | Y76201 | WO9958660-A1 | Immune/Hematopoietic |
| HNTSJ84 | Y76202 | WO9958660-A1 | Cancer |
| HOHCG16 | Y76203 | WO9958660-A1 | Digestive, Musculoskeletal |
| HTHCB31 | Y76204 | WO9958660-A1 | Immune/Hematopoietic, Mixed Fetal, |
| | | | Neural/Sensory |
| HUKAM16 | Y76205 | WO9958660-A1 | Cancer |
| HLDOJ66 | Y76206 | WO9958660-A1 | Digestive |
| HTXKF10 | Y76207 | WO9958660-A1 | Immune/Hematopoietic |
| HPMAI22 | Y76208 | WO9958660-A1 | Reproductive |
| HL2AG57 | Y76209 | WO9958660-A1 | Cancer |
| HUSAM59 | Y76210 | WO9958660-A1 | Cancer |
| HNGGR26 | Y76211 | WO9958660-A1 | Immune/Hematopoietic |
| HTLCX30 | Y76212 | WO9958660-A1 | Reproductive |
| HCEBC87 | Y76213 | WO9958660-A1 | Cancer |
| HATCB92 | Y76214 | WO9958660-A1 | Endocrine |
| HLHAL68 | Y76216 | WO9958660-A1 | Respiratory |
| HEOMR73 | Y76217 | WO9958660-A1 | Immune/Hematopoietic |
| HETIB83 | Y76218 | WO9958660-A1 | Cancer |
| HJPDD28 | Y76219 | WO9958660-A1 | Cancer |
| HBAMB15 | Y76220 | WO9958660-A1 | Cardiovascular, Excretory, Reproductive |
| HBAFQ33 | Y76221 | WO9958660-A1 | Cancer |
| HTOAI70 | Y76222 | WO9958660-A1 | Immune/Hematopoietic |
| HJPDD28 | Y76223 | WO9958660-A1 | Cancer |
| HRACG45 | Y76266 | WO9958660-A1 | Cancer |
| HBXCD55 | Y76303 | WO9958660-A1 | Cancer |
| HOSFT61 | Y76325 | WO9958660-A1 | Cancer |
| HWBBP10 | Y86215 | WO9966041-A1 | Immune/Hematopoietic, Neural/Sensory |
| HWBDO80 | Y86216 | WO9966041-A1 | Immune/Hematopoietic, Musculoskeletal, |
| | | | Reproductive |
| HWHGU54 | Y86217 | WO9966041-A1 | Connective/Epithelial |
| HYACI76 | Y86218 | WO9966041-A1 | Cancer |
| HBHMA23 | Y86219 | WO9966041-A1 | Cancer |
| HCE3G20 | Y86220 | WO9966041-A1 | Cancer |
| HCEJP80 | Y86221 | WO9966041-A1 | Cardiovascular, Neural/Sensory |
| HCUDD24 | Y86222 | WO9966041-A1 | Digestive, Immune/Hematopoietic, Reproductive |
| HDPTD15 | Y86223 | WO9966041-A1 | Immune/Hematopoietic |
| HDPWU34 | Y86224 | WO9966041-A1 | Cancer |
| HEOOV79 | Y86225 | WO9966041-A1 | Cancer |
| HFKET93 | Y86226 | WO9966041-A1 | Excretory, Immune/Hematopoietic, Neural/Sensory |
| HFTDL56 | Y86227 | WO9966041-A1 | Cancer |
| HFXJX44 | Y86228 | WO9966041-A1 | Cancer |
| HKACU58 | Y86229 | WO9966041-A1 | Cancer |
| HKFBC53 | Y86230 | WO9966041-A1 | Cancer |
| HLTHR66 | Y86231 | WO9966041-A1 | Cancer |
| HLYBA69 | Y86232 | WO9966041-A1 | Cancer |
| HNTMX29 | Y86233 | WO9966041-A1 | Cancer |
| HNTNC20 | Y86234 | WO9966041-A1 | Cancer |
| HNTNI01 | Y86235 | WO9966041-A1 | Cancer |
| HPIBW65 | Y86236 | WO9966041-A1 | Cancer |
| HSMBE69 | Y86237 | WO9966041-A1 | Cancer |
| HT4FW61 | Y86238 | WO9966041-A1 | Connective/Epithelial, Immune/Hematopoietic, |
| | | | Reproductive |
| HYABK95 | Y86239 | WO9966041-A1 | Cancer |
| HYACE88 | Y86240 | WO9966041-A1 | Cancer |
| HOABR60 | Y86241 | WO9966041-A1 | Cancer |
| HAPOM45 | Y86243 | WO9966041-A1 | Cardiovascular, Digestive |
| HCEJQ69 | Y86244 | WO9966041-A1 | Cancer |
| HAGFI62 | Y86245 | WO9966041-A1 | Cancer |
| HAGGS43 | Y86246 | WO9966041-A1 | Neural/Sensory |
| HBJHP03 | Y86247 | WO9966041-A1 | Immune/Hematopoietic, Reproductive |
| HCHPF68 | Y86248 | WO9966041-A1 | Reproductive |
| HDPJF37 | Y86249 | WO9966041-A1 | Cancer |
| HSDEZ20 | Y86250 | WO9966041-A1 | Neural/Sensory |
| HTEKU58 | Y86251 | WO9966041-A1 | Cancer |
| HLTBL58 | Y86252 | WO9966041-A1 | Immune/Hematopoietic, Musculoskeletal, |
| | | | Neural/Sensory |
| HPWDJ42 | Y86253 | WO9966041-A1 | Digestive, Reproductive |
| HRACD15 | Y86254 | WO9966041-A1 | Cancer |
| HSIAC80 | Y86255 | WO9966041-A1 | Cancer |
| HAGFD18 | Y86256 | WO9966041-A1 | Cancer |
| HAJAP76 | Y86257 | WO9966041-A1 | Cancer |
| HDTGC86 | Y86258 | WO9966041-A1 | Digestive, Immune/Hematopoietic, Reproductive |
| HAGDI35 | Y86259 | WO9966041-A1 | Cancer |
| HELHN47 | Y86260 | WO9966041-A1 | Cancer |
| HPRBC80 | Y86261 | WO9966041-A1 | Cancer |
| HAQAR23 | Y86262 | WO9966041-A1 | Cancer |
| HAIFL18 | Y86263 | WO9966041-A1 | Digestive, Immune/Hematopoietic |
| HJPAY76 | Y86264 | WO9966041-A1 | Cancer |
| HUSXE77 | Y86265 | WO9966041-A1 | Cancer |
| HUFEF62 | Y86266 | WO9966041-A1 | Digestive |
| HTWJK32 | Y86267 | WO9966041-A1 | Cancer |
| HTWDF76 | Y86268 | WO9966041-A1 | Immune/Hematopoietic |
| HTPBN68 | Y86269 | WO9966041-A1 | Digestive |
| HTOIY21 | Y86270 | WO9966041-A1 | Immune/Hematopoietic |
| HTLDD53 | Y86271 | WO9966041-A1 | Connective/Epithelial, Digestive, Reproductive |
| HTLFG05 | Y86272 | WO9966041-A1 | Cancer |
| HDPXR23 | Y86273 | WO9966041-A1 | Digestive, Immune/Hematopoietic |
| HSIAC45 | Y86274 | WO9966041-A1 | Digestive, Immune/Hematopoietic |
| HSRGW16 | Y86275 | WO9966041-A1 | Cancer |
| HSSJC35 | Y86276 | WO9966041-A1 | Cancer |
| HTEAX23 | Y86277 | WO9966041-A1 | Reproductive |
| HTGCH22 | Y86278 | WO9966041-A1 | Immune/Hematopoietic, Mixed Fetal, Reproductive |
| HTJMA95 | Y86279 | WO9966041-A1 | Cancer |
| HHEAA08 | Y86280 | WO9966041-A1 | Immune/Hematopoietic |
| HBQAA49 | Y86281 | WO9966041-A1 | Neural/Sensory |
| HDPBI32 | Y86282 | WO9966041-A1 | Excretory, Immune/Hematopoietic, Neural/Sensory |
| HBIBF16 | Y86283 | WO9966041-A1 | Neural/Sensory |
| HBCAY05 | Y86284 | WO9966041-A1 | Cancer |
| HCUCK44 | Y86285 | WO9966041-A1 | Cancer |
| HCE2W56 | Y86286 | WO9966041-A1 | Cancer |
| HCWAG01 | Y86287 | WO9966041-A1 | Immune/Hematopoietic |
| HDRMI82 | Y86289 | WO9966041-A1 | Cancer |
| HEPCU48 | Y86290 | WO9966041-A1 | Cancer |
| HDPRK33 | Y86291 | WO9966041-A1 | Immune/Hematopoietic, Mixed Fetal |
| HKGAX42 | Y86292 | WO9966041-A1 | Digestive, Immune/Hematopoietic, Reproductive |
| HLMAZ95 | Y86293 | WO9966041-A1 | Cancer |
| HLMFC07 | Y86294 | WO9966041-A1 | Digestive, Immune/Hematopoietic |
| HL2AG87 | Y86295 | WO9966041-A1 | Immune/Hematopoietic, Neural/Sensory, |
| | | | Reproductive |
| HKGCO27 | Y86296 | WO9966041-A1 | Cancer |
| HLDCE79 | Y86297 | WO9966041-A1 | Digestive |
| HERAD40 | Y86298 | WO9966041-A1 | Connective/Epithelial |
| HFOXB55 | Y86299 | WO9966041-A1 | Cancer |
| HFVGZ42 | Y86300 | WO9966041-A1 | Cancer |
| HNHAF39 | Y86301 | WO9966041-A1 | Immune/Hematopoietic |
| HNTSW57 | Y86302 | WO9966041-A1 | Cancer |
| HOGCK20 | Y86303 | WO9966041-A1 | Cancer |
| HLYES38 | Y86305 | WO9966041-A1 | Immune/Hematopoietic, Reproductive |
| HMECK83 | Y86306 | WO9966041-A1 | Cardiovascular |
| HMQAG66 | Y86308 | WO9966041-A1 | Immune/Hematopoietic |
| HWBBP10 | Y86309 | WO9966041-A1 | Immune/Hematopoietic, Neural/Sensory |
| HAPAK52 | Y86310 | WO9966041-A1 | Cancer |
| HDPWU34 | Y86311 | WO9966041-A1 | Cancer |
| HKACU58 | Y86312 | WO9966041-A1 | Cancer |
| HLDBQ19 | Y86314 | WO9966041-A1 | Cancer |
| HNTMX29 | Y86315 | WO9966041-A1 | Cancer |
| HOABR60 | Y86316 | WO9966041-A1 | Cancer |
| HPWDJ42 | Y86317 | WO9966041-A1 | Digestive, Reproductive |
| HPWDJ42 | Y86318 | WO9966041-A1 | Digestive, Reproductive |
| HRACD15 | Y86319 | WO9966041-A1 | Cancer |
| HPRBC80 | Y86320 | WO9966041-A1 | Cancer |
| HUFEF62 | Y86321 | WO9966041-A1 | Digestive |
| HTLFG05 | Y86322 | WO9966041-A1 | Cancer |
| HDPXR23 | Y86323 | WO9966041-A1 | Digestive, Immune/Hematopoietic |
| HSRGW16 | Y86324 | WO9966041-A1 | Cancer |
| HDPBI32 | Y86327 | WO9966041-A1 | Excretory, Immune/Hematopoietic, Neural/Sensory |
| HDRMI82 | Y86328 | WO9966041-A1 | Cancer |
| HKGCO27 | Y86330 | WO9966041-A1 | Cancer |
| HNTSW57 | Y86332 | WO9966041-A1 | Cancer |
| HOGCK20 | Y86333 | WO9966041-A1 | Cancer |
| HNTMX29 | Y86388 | WO9966041-A1 | Cancer |
| HPRBC80 | Y86463 | WO9966041-A1 | Cancer |
| HTLFG05 | Y86488 | WO9966041-A1 | Cancer |
| HDPXR23 | Y86489 | WO9966041-A1 | Digestive, Immune/Hematopoietic |
| HSRGW16 | Y86496 | WO9966041-A1 | Cancer |
| HDRMI82 | Y86532 | WO9966041-A1 | Cancer |
| HNTSW57 | Y86571 | WO9966041-A1 | Cancer |
| HISCN02 | Y87064 | WO200004140-A1 | Digestive |
| HHGDM70 | Y87065 | WO200004140-A1 | Immune/Hematopoietic |
| HHPGO40 | Y87066 | WO200004140-A1 | Cancer |
| HAMGG68 | Y87067 | WO200004140-A1 | Cancer |
| HAPOM49 | Y87068 | WO200004140-A1 | Cancer |
| HBGBA69 | Y87069 | WO200004140-A1 | Cancer |
| HBJFJ26 | Y87070 | WO200004140-A1 | Cancer |
| HCEDH38 | Y87071 | WO200004140-A1 | Mixed Fetal, Neural/Sensory |
| HDPOJ08 | Y87072 | WO200004140-A1 | Cancer |
| HDPRX82 | Y87073 | WO200004140-A1 | Cancer |
| HELGK31 | Y87074 | WO200004140-A1 | Cancer |
| HFPCX64 | Y87075 | WO200004140-A1 | Mixed Fetal, Neural/Sensory |
| HEXDO60 | Y87076 | WO200004140-A1 | Neural/Sensory |
| HAUAI83 | Y87077 | WO200004140-A1 | Reproductive |
| HKGAH42 | Y87078 | WO200004140-A1 | Neural/Sensory |
| HMIAP86 | Y87079 | WO200004140-A1 | Cancer |
| HMUAP70 | Y87080 | WO200004140-A1 | Cancer |
| HRACJ35 | Y87081 | WO200004140-A1 | Cancer |
| HTWDE26 | Y87082 | WO200004140-A1 | Cancer |
| HBGBB44 | Y87083 | WO200004140-A1 | Cancer |
| HBAEA02 | Y87084 | WO200004140-A1 | Cancer |
| H2CBT75 | Y87085 | WO200004140-A1 | Cancer |
| HAGDQ42 | Y87086 | WO200004140-A1 | Cancer |
| HBMCJ42 | Y87087 | WO200004140-A1 | Immune/Hematopoietic, Reproductive |
| HLCDA16 | Y87089 | WO200004140-A1 | Cancer |
| HELHL48 | Y87090 | WO200004140-A1 | Cancer |
| HISAQ04 | Y87091 | WO200004140-A1 | Digestive, Neural/Sensory, Reproductive |
| HJACB89 | Y87092 | WO200004140-A1 | Cancer |
| HTECC05 | Y87093 | WO200004140-A1 | Cancer |
| HBJLF01 | Y87094 | WO200004140-A1 | Cancer |
| HBXGP60 | Y87095 | WO200004140-A1 | Cancer |
| HCE5B20 | Y87096 | WO200004140-A1 | Mixed Fetal, Neural/Sensory |
| HCMSQ56 | Y87097 | WO200004140-A1 | Cancer |
| HCNAH57 | Y87098 | WO200004140-A1 | Digestive |
| HCUEP91 | Y87099 | WO200004140-A1 | Immune/Hematopoietic |
| HDPCJ91 | Y87100 | WO200004140-A1 | Cancer |
| HDPGK25 | Y87101 | WO200004140-A1 | Cancer |
| HE2DY70 | Y87102 | WO200004140-A1 | Immune/Hematopoietic, Mixed Fetal, |
| | | | Musculoskeletal |
| HE2NV57 | Y87103 | WO200004140-A1 | Cancer |
| HETBR16 | Y87104 | WO200004140-A1 | Digestive, Immune/Hematopoietic, Reproductive |
| HFXDG13 | Y87105 | WO200004140-A1 | Cancer |
| HFXKY27 | Y87106 | WO200004140-A1 | Neural/Sensory |
| HHPEC09 | Y87107 | WO200004140-A1 | Cancer |
| HISAD54 | Y87108 | WO200004140-A1 | Cancer |
| HJBCY35 | Y87109 | WO200004140-A1 | Cancer |
| HKAEA19 | Y87110 | WO200004140-A1 | Cancer |
| HKGDL36 | Y87111 | WO200004140-A1 | Cancer |
| HLDBS43 | Y87112 | WO200004140-A1 | Cancer |
| HLWAD92 | Y87113 | WO200004140-A1 | Cancer |
| HLYBI15 | Y87114 | WO200004140-A1 | Immune/Hematopoietic |
| HMEJE05 | Y87115 | WO200004140-A1 | Cancer |
| HNGIX55 | Y87116 | WO200004140-A1 | Immune/Hematopoietic |
| HNHEX30 | Y87117 | WO200004140-A1 | Immune/Hematopoietic |
| HPJBI33 | Y87118 | WO200004140-A1 | Reproductive |
| HRABA80 | Y87119 | WO200004140-A1 | Excretory |
| HRACD80 | Y87120 | WO200004140-A1 | Excretory, Reproductive |
| HSLCX03 | Y87121 | WO200004140-A1 | Cancer |
| HT5GJ57 | Y87122 | WO200004140-A1 | Cancer |
| HTACS42 | Y87123 | WO200004140-A1 | Cancer |
| HTEKE40 | Y87124 | WO200004140-A1 | Cancer |
| HTOBX69 | Y87125 | WO200004140-A1 | Cancer |
| HUVEO77 | Y87126 | WO200004140-A1 | Reproductive |
| H2CBG48 | Y87127 | WO200004140-A1 | Cancer |
| H2CBU83 | Y87128 | WO200004140-A1 | Cancer |
| HAPNY94 | Y87129 | WO200004140-A1 | Cancer |
| HBJHZ58 | Y87130 | WO200004140-A1 | Immune/Hematopoietic, Reproductive |
| HCE2B33 | Y87131 | WO200004140-A1 | Cancer |
| HDPBQ02 | Y87132 | WO200004140-A1 | Immune/Hematopoietic |
| HFIYI70 | Y87133 | WO200004140-A1 | Cancer |
| HDPOZ56 | Y87134 | WO200004140-A1 | Cancer |
| HAPOM49 | Y87136 | WO200004140-A1 | Cancer |
| HBJFJ26 | Y87137 | WO200004140-A1 | Cancer |
| HCNUA40 | Y87138 | WO200004140-A1 | Cancer |
| HCEBW71 | Y87139 | WO200004140-A1 | Mixed Fetal, Neural/Sensory |
| HCEBW71 | Y87140 | WO200004140-A1 | Mixed Fetal, Neural/Sensory |
| HAUAI83 | Y87141 | WO200004140-A1 | Reproductive |
| HFLQB16 | Y87143 | WO200004140-A1 | Cancer |
| HAGFY16 | Y87144 | WO200004140-A1 | Cancer |
| HFLQB16 | Y87146 | WO200004140-A1 | Cancer |
| HAGFY16 | Y87147 | WO200004140-A1 | Cancer |
| HMHBN40 | Y87149 | WO200004140-A1 | Cancer |
| HDPBQ71 | Y87150 | WO200004140-A1 | Cancer |
| HSKCT36 | Y87151 | WO200004140-A1 | Cancer |
| HRACD80 | Y87152 | WO200004140-A1 | Excretory, Reproductive |
| HSLCX03 | Y87153 | WO200004140-A1 | Cancer |
| H2CBU83 | Y87154 | WO200004140-A1 | Cancer |
| HFLQB16 | Y87180 | WO200004140-A1 | Cancer |
| HAGFY16 | Y87181 | WO200004140-A1 | Cancer |
| HFLQB16 | Y87183 | WO200004140-A1 | Cancer |
| HAGFY16 | Y87184 | WO200004140-A1 | Cancer |
| HMHBN40 | Y87187 | WO200004140-A1 | Cancer |
| HDPBQ71 | Y87188 | WO200004140-A1 | Cancer |
| HSKCT36 | Y87192 | WO200004140-A1 | Cancer |
| HRACD80 | Y87205 | WO200004140-A1 | Excretory, Reproductive |
| HSLCX03 | Y87208 | WO200004140-A1 | Cancer |
| H2CBU83 | Y87215 | WO200004140-A1 | Cancer |
| HISCH47 | Y87784 | US6054289-A | Cancer |
| HADCD24 | Y87789 | US6054289-A | Cancer |
| HDTEA84 | Y90357 | WO200052028-A1 | Cancer |
| HKGCN17 | Y91346 | WO200011014-A1 | Immune/Hematopoietic, Neural/Sensory, |
| | | | Reproductive |
| HETAD68 | Y91347 | WO200011014-A1 | Cancer |
| HPIAT78 | Y91348 | WO200011014-A1 | Cancer |
| HHFHG52 | Y91349 | WO200011014-A1 | Cancer |
| HDTAB58 | Y91350 | WO200011014-A1 | Cancer |
| HEOMQ62 | Y91351 | WO200011014-A1 | Cancer |
| HWLJQ88 | Y91352 | WO200011014-A1 | Digestive |
| HMICP03 | Y91353 | WO200011014-A1 | Cancer |
| HAJAB01 | Y91354 | WO200011014-A1 | Cancer |
| HE2AT09 | Y91355 | WO200011014-A1 | Cancer |
| HSDJA15 | Y91356 | WO200011014-A1 | Cancer |
| HAMGW29 | Y91357 | WO200011014-A1 | Cancer |
| HAPSR85 | Y91358 | WO200011014-A1 | Digestive, Endocrine |
| HTOHD42 | Y91359 | WO200011014-A1 | Immune/Hematopoietic |
| HWLIH65 | Y91360 | WO200011014-A1 | Cancer |
| HTOJA73 | Y91361 | WO200011014-A1 | Immune/Hematopoietic |
| HPMGJ45 | Y91362 | WO200011014-A1 | Cancer |
| HFVIC62 | Y91363 | WO200011014-A1 | Digestive, Immune/Hematopoietic, Reproductive |
| HHENW77 | Y91364 | WO200011014-A1 | Cancer |
| HMSIV91 | Y91365 | WO200011014-A1 | Cancer |
| HMSKC04 | Y91366 | WO200011014-A1 | Immune/Hematopoietic |
| HSAZG33 | Y91367 | WO200011014-A1 | Immune/Hematopoietic |
| HTEBC92 | Y91368 | WO200011014-A1 | Cancer |
| HTXEL29 | Y91369 | WO200011014-A1 | Immune/Hematopoietic |
| HDPAW44 | Y91370 | WO200011014-A1 | Cancer |
| HMACS20 | Y91371 | WO200011014-A1 | Cancer |
| HAJAY88 | Y91372 | WO200011014-A1 | Immune/Hematopoietic |
| HBOEG69 | Y91373 | WO200011014-A1 | Cancer |
| HWLEQ37 | Y91374 | WO200011014-A1 | Cancer |
| HE9CS37 | Y91375 | WO200011014-A1 | Cancer |
| HNGEI34 | Y91376 | WO200011014-A1 | Immune/Hematopoietic |
| HTOAT76 | Y91377 | WO200011014-A1 | Excretory, Immune/Hematopoietic |
| HDPVH60 | Y91378 | WO200011014-A1 | Cancer |
| HLYCR65 | Y91379 | WO200011014-A1 | Cancer |
| HARAY91 | Y91380 | WO200011014-A1 | Immune/Hematopoietic, Mixed Fetal, |
| | | | Neural/Sensory |
| HCHNT03 | Y91381 | WO200011014-A1 | Digestive, Reproductive |
| HCUBW95 | Y91382 | WO200011014-A1 | Immune/Hematopoietic, Neural/Sensory |
| HDPLV95 | Y91383 | WO200011014-A1 | Immune/Hematopoietic, Reproductive |
| HEMGB12 | Y91384 | WO200011014-A1 | Cancer |
| HHENP27 | Y91385 | WO200011014-A1 | Cancer |
| HSPBF70 | Y91386 | WO200011014-A1 | Cancer |
| HTXKB57 | Y91387 | WO200011014-A1 | Cancer |
| HUKAA55 | Y91388 | WO200011014-A1 | Digestive, Immune/Hematopoietic, Reproductive |
| HFXGT58 | Y91389 | WO200011014-A1 | Neural/Sensory |
| HUSFF19 | Y91391 | WO200011014-A1 | Cancer |
| HUVDJ43 | Y91393 | WO200011014-A1 | Cardiovascular, Reproductive |
| HTLCU49 | Y91394 | WO200011014-A1 | Cancer |
| HDTAB58 | Y91395 | WO200011014-A1 | Cancer |
| HWLJQ88 | Y91396 | WO200011014-A1 | Digestive |
| HUVDJ43 | Y91399 | WO200011014-A1 | Cardiovascular, Reproductive |
| HUVDJ43 | Y91400 | WO200011014-A1 | Cardiovascular, Reproductive |
| HTLCU49 | Y91401 | WO200011014-A1 | Cancer |
| HUVDJ43 | Y91446 | WO200011014-A1 | Cardiovascular, Reproductive |
| HUVDJ43 | Y91448 | WO200011014-A1 | Cardiovascular, Reproductive |
| HFKIB49 | Y91449 | WO200011014-A1 | Cancer |
| HDPTK41 | Y91451 | WO200006698-A1 | Cancer |
| HFXGT26 | Y91452 | WO200006698-A1 | Cancer |
| HLTGX30 | Y91453 | WO200006698-A1 | Immune/Hematopoietic |
| HLTHG37 | Y91454 | WO200006698-A1 | Cancer |
| HNTMZ90 | Y91455 | WO200006698-A1 | Digestive, Reproductive |
| HPIBX03 | Y91456 | WO200006698-A1 | Cancer |
| H6EDY30 | Y91457 | WO200006698-A1 | Cancer |
| HAMGR28 | Y91458 | WO200006698-A1 | Cancer |
| HAPNZ94 | Y91459 | WO200006698-A1 | Cancer |
| HATCP77 | Y91460 | WO200006698-A1 | Cancer |
| HDABR72 | Y91461 | WO200006698-A1 | Cancer |
| HDPKB18 | Y91462 | WO200006698-A1 | Immune/Hematopoietic |
| HEQCC55 | Y91463 | WO200006698-A1 | Cancer |
| HETDE26 | Y91464 | WO200006698-A1 | Cancer |
| HOEDH84 | Y91465 | WO200006698-A1 | Cancer |
| HPIBT55 | Y91466 | WO200006698-A1 | Cancer |
| HSLCS05 | Y91467 | WO200006698-A1 | Cancer |
| HDPDD03 | Y91468 | WO200006698-A1 | Cancer |
| HDTDQ23 | Y91470 | WO200006698-A1 | Cancer |
| HE2PY40 | Y91471 | WO200006698-A1 | Mixed Fetal |
| HEONM66 | Y91472 | WO200006698-A1 | Immune/Hematopoietic |
| HKAEG43 | Y91473 | WO200006698-A1 | Cancer |
| HLHDP65 | Y91474 | WO200006698-A1 | Cancer |
| HLMDO03 | Y91475 | WO200006698-A1 | Cancer |
| HMAGK93 | Y91476 | WO200006698-A1 | Cancer |
| HMEAL02 | Y91477 | WO200006698-A1 | Cardiovascular |
| HMKCH52 | Y91478 | WO200006698-A1 | Neural/Sensory |
| HCEFB69 | Y91479 | WO200006698-A1 | Cancer |
| HKADM92 | Y91480 | WO200006698-A1 | Cancer |
| HSPMG77 | Y91481 | WO200006698-A1 | Digestive |
| HSQAC69 | Y91482 | WO200006698-A1 | Cancer |
| HSTBJ86 | Y91483 | WO200006698-A1 | Connective/Epithelial |
| HUVDJ43 | Y91485 | WO200006698-A1 | Cardiovascular, Reproductive |
| HADCP14 | Y91486 | WO200006698-A1 | Connective/Epithelial |
| HBXCF95 | Y91487 | WO200006698-A1 | Cancer |
| HEQBU15 | Y91488 | WO200006698-A1 | Cancer |
| HL1BD22 | Y91489 | WO200006698-A1 | Cancer |
| HOEEU24 | Y91490 | WO200006698-A1 | Cancer |
| HTTBR96 | Y91491 | WO200006698-A1 | Reproductive |
| HWHQS55 | Y91492 | WO200006698-A1 | Cancer |
| HCEEK50 | Y91493 | WO200006698-A1 | Cancer |
| HCWBU94 | Y91494 | WO200006698-A1 | Immune/Hematopoietic |
| HE2NR62 | Y91495 | WO200006698-A1 | Cancer |
| HHSGH19 | Y91496 | WO200006698-A1 | Neural/Sensory |
| HDPGT01 | Y91497 | WO200006698-A1 | Cancer |
| HOHCA35 | Y91499 | WO200006698-A1 | Cancer |
| HPMGP24 | Y91500 | WO200006698-A1 | Mixed Fetal, Reproductive |
| HSDIE16 | Y91501 | WO200006698-A1 | Neural/Sensory |
| HSOBK48 | Y91502 | WO200006698-A1 | Digestive |
| HTADH39 | Y91503 | WO200006698-A1 | Cancer |
| HUSGT36 | Y91504 | WO200006698-A1 | Cardiovascular |
| HVAAE95 | Y91505 | WO200006698-A1 | Digestive |
| HHEAH25 | Y91506 | WO200006698-A1 | Cancer |
| HBJIY92 | Y91507 | WO200006698-A1 | Cancer |
| HCLCW50 | Y91508 | WO200006698-A1 | Respiratory |
| HDRMF68 | Y91509 | WO200006698-A1 | Digestive, Respiratory |
| HOUGG12 | Y91510 | WO200006698-A1 | Cancer |
| HEEAQ11 | Y91511 | WO200006698-A1 | Reproductive |
| HEEAZ65 | Y91512 | WO200006698-A1 | Musculoskeletal, Reproductive |
| HEGAN94 | Y91513 | WO200006698-A1 | Reproductive |
| HFXBL33 | Y91514 | WO200006698-A1 | Cancer |
| HLIBD68 | Y91515 | WO200006698-A1 | Cancer |
| HLTCO33 | Y91516 | WO200006698-A1 | Immune/Hematopoietic, Neural/Sensory, |
| | | | Reproductive |
| HLYAC95 | Y91517 | WO200006698-A1 | Immune/Hematopoietic |
| HNHKS18 | Y91519 | WO200006698-A1 | Immune/Hematopoietic |
| HSLJW78 | Y91520 | WO200006698-A1 | Musculoskeletal |
| HHFHD01 | Y91521 | WO200006698-A1 | Cardiovascular, Musculoskeletal, Neural/Sensory |
| HLWAE11 | Y91522 | WO200006698-A1 | Cancer |
| HCYBN55 | Y91523 | WO200006698-A1 | Cancer |
| HEONX38 | Y91524 | WO200006698-A1 | Cancer |
| HLDQU79 | Y91525 | WO200006698-A1 | Cancer |
| HSYBK21 | Y91526 | WO200006698-A1 | Cancer |
| HTHDS25 | Y91528 | WO200006698-A1 | Endocrine, Immune/Hematopoietic |
| HFIHO70 | Y91529 | WO200006698-A1 | Cancer |
| HPMEI86 | Y91530 | WO200006698-A1 | Cancer |
| HSOBV29 | Y91531 | WO200006698-A1 | Cancer |
| HWABY10 | Y91532 | WO200006698-A1 | Cancer |
| HACCI17 | Y91533 | WO200006698-A1 | Cancer |
| HAPQT22 | Y91534 | WO200006698-A1 | Immune/Hematopoietic |
| HDPBO81 | Y91535 | WO200006698-A1 | Digestive, Immune/Hematopoietic, Reproductive |
| HDPGI49 | Y91536 | WO200006698-A1 | Cancer |
| HDTBV77 | Y91537 | WO200006698-A1 | Cancer |
| HFIUE82 | Y91538 | WO200006698-A1 | Cancer |
| HHEND31 | Y91539 | WO200006698-A1 | Cancer |
| HKMND01 | Y91540 | WO200006698-A1 | Excretory |
| HLDBI84 | Y91541 | WO200006698-A1 | Cancer |
| HLTEK17 | Y91542 | WO200006698-A1 | Cancer |
| HEBEJ18 | Y91543 | WO200006698-A1 | Cancer |
| HMEAI48 | Y91544 | WO200006698-A1 | Cardiovascular |
| HNHGN91 | Y91545 | WO200006698-A1 | Digestive, Endocrine, Immune/Hematopoietic |
| HODAE92 | Y91546 | WO200006698-A1 | Cancer |
| HODDF13 | Y91547 | WO200006698-A1 | Reproductive |
| HATEF60 | Y91548 | WO200006698-A1 | Cancer |
| HLTHG37 | Y91549 | WO200006698-A1 | Cancer |
| HAMGR28 | Y91550 | WO200006698-A1 | Cancer |
| HDPKB18 | Y91551 | WO200006698-A1 | Immune/Hematopoietic |
| HEQCC55 | Y91552 | WO200006698-A1 | Cancer |
| HEONM66 | Y91554 | WO200006698-A1 | Immune/Hematopoietic |
| HKAEG43 | Y91555 | WO200006698-A1 | Cancer |
| HLHDP65 | Y91556 | WO200006698-A1 | Cancer |
| HOEEU24 | Y91557 | WO200006698-A1 | Cancer |
| HHEAH25 | Y91558 | WO200006698-A1 | Cancer |
| HCYBN55 | Y91559 | WO200006698-A1 | Cancer |
| HEONX38 | Y91560 | WO200006698-A1 | Cancer |
| HFIHO70 | Y91561 | WO200006698-A1 | Cancer |
| HACCI17 | Y91562 | WO200006698-A1 | Cancer |
| HDPBO81 | Y91563 | WO200006698-A1 | Digestive, Immune/Hematopoietic, Reproductive |
| HAMGR28 | Y91599 | WO200006698-A1 | Cancer |
| HDPKB18 | Y91603 | WO200006698-A1 | Immune/Hematopoietic |
| HEQCC55 | Y91604 | WO200006698-A1 | Cancer |
| HLHDP65 | Y91631 | WO200006698-A1 | Cancer |
| HOEEU24 | Y91643 | WO200006698-A1 | Cancer |
| HHEAH25 | Y91647 | WO200006698-A1 | Cancer |
| HHEAH25 | Y91648 | WO200006698-A1 | Cancer |
| HLIBD68 | Y91656 | WO200006698-A1 | Cancer |
| HCYBN55 | Y91670 | WO200006698-A1 | Cancer |
| HEONX38 | Y91672 | WO200006698-A1 | Cancer |
| HFIHO70 | Y91679 | WO200006698-A1 | Cancer |
| HMKBA64 | Y91681 | WO200006698-A1 | Cancer |
| HACCI17 | Y91683 | WO200006698-A1 | Cancer |
| HMKEA94 | Y93650 | WO200036105-A1 | Cancer |
| HE9SF68 | Y93973 | WO200042189-A1 | Cancer |
| HTSGS30 | Y93974 | WO200042189-A1 | Digestive, Immune/Hematopoietic, Mixed Fetal |
| HDQAC88 | Y95534 | WO200040726-A1 | Cancer |
| HDPMM34 | Y96280 | WO200028035-A1 | Cancer |
| HKABZ65 | Y96962 | WO200039327-A1 | Connective/Epithelial |
| HWHGB15 | Y96963 | WO200039327-A1 | Connective/Epithelial |
| HCDDP40 | Y96964 | WO200039327-A1 | Immune/Hematopoietic, Musculoskeletal |
| HETBE01 | B03767 | US6066724-A | Cancer |
| HETGI70 | B03768 | US6066724-A | Cancer |
| HETDK42 | B03769 | US6066724-A | Cancer |
| HTEMZ33 | B07705 | WO200043493-A2 | Cancer |
| HE8AW20 | B07941 | US6103871-A | Cancer |
| HNEDU15 | B08659 | WO200050597-A2 | Cancer |
| HLTBT71 | B08661 | WO200050597-A2 | Cancer |
| HBICD95 | B08785 | WO200050620-A2 | Cancer |
| HE9CC44 | B08786 | US6110893-A | Cancer |
| HPRCC57 | B10293 | US6077692-A | Cancer |
| HPRCC57 | B10304 | US6077692-A | Cancer |
| HPRCC57 | B10310 | US6077692-A | Cancer |
| HPRCC57 | B10311 | US6077692-A | Cancer |
| HPRCC57 | B10312 | US6077692-A | Cancer |
| HPRCC57 | B10313 | US6077692-A | Cancer |
| HPRCC57 | B10316 | US6077692-A | Cancer |
| HPRCC57 | B10320 | US6077692-A | Cancer |
| HILBX90 | B11125 | US6133422-A | Cancer |
| HCQAS17 | B12900 | US6080722-A | Digestive, Mixed Fetal, Reproductive |
| HBMSE33 | B15366 | WO200042165-A2 | Cancer |
| HE2BG16 | B15413 | US6090575-A | Cancer |
| HT4CC72 | B18618 | WO200053223-A1 | Immune/Hematopoietic |
| HAPOR40 | B18750 | WO200055204-A1 | Cancer |
| HTSGS30 | B18755 | WO200055204-A1 | Digestive, Immune/Hematopoietic, Mixed Fetal |
| HFGAM58 | B18803 | WO200053210-A1 | Cancer |
| HSDFB55 | B19550 | WO200053793-A1 | Cancer |
| HUVEO91 | B19863 | WO200066608-A1 | Cancer |
| HCDDP40 | B25583 | WO200029435-A1 | Immune/Hematopoietic, Musculoskeletal |
| HMELK96 | B26981 | WO200056862-A1 | Cancer |
| HMELK96 | B26987 | WO200056862-A1 | Cancer |
| HTTBN61 | B26990 | WO200056862-A1 | Cancer |
| HCUDS60 | B26991 | WO200056862-A1 | Cancer |
| HLYBX88 | B26992 | WO200056862-A1 | Cancer |
| HILBI36 | B28524 | US6130051-A | Cancer |
| HLYBX88 | B29790 | WO200066156-A1 | Cancer |
| HCEMP60 | B29923 | US6130061-A | Cancer |
| HE8AE45 | B33821 | WO200056753-A1 | Cancer |
| HE2OA95 | B33822 | WO200056753-A1 | Cancer |
| HJACE54 | B35705 | WO200063221-A2 | Cancer |
| HTTBN61 | B36265 | WO200064465-A1 | Cancer |
| HPRCB54 | B36696 | WO200071150-A1 | Cancer |
| HSDME38 | B39392 | WO200057903-A2 | Cancer |
| HSDME38 | B39393 | WO200057903-A2 | Cancer |
| HPDDY64 | B43604 | WO200055350-A1 | Cancer |
| HPABA51 | B44685 | WO200058339-A2 | Cancer |
| HPMSM24 | B45376 | WO200061628-A1 | Cancer |
| HOUCQ17 | B50002 | WO200071577-A1 | Cancer |
| HODAH63 | B50272 | WO200071567-A2 | Neural/Sensory, Reproductive |
| HODAH63 | B50282 | WO200071567-A2 | Neural/Sensory, Reproductive |
| HODAH63 | B50283 | WO200071567-A2 | Neural/Sensory, Reproductive |
| HCEGY95 | B50289 | WO200071582-A1 | Immune/Hematopoietic, Mixed Fetal, |
| | | | Neural/Sensory |
| HE9CC44 | B50293 | WO200071715-A1 | Cancer |
| HAGAT55 | B50294 | WO200071715-A1 | Cancer |
| HAGAT55 | B50704 | WO200071152-A1 | Cancer |
| HKABO35 | B50892 | WO200073321-A1 | Cancer |
| HETJY78 | B51152 | US6153739-A | Cancer |
| HPRCC57 | B58248 | WO200055180-A2 | Cancer |
| HHFCU19 | B58276 | WO200055180-A2 | Cancer |
| HNFAG09 | B58319 | WO200055180-A2 | Cancer |
| HBZSD43 | B58925 | WO200055173-A1 | Cancer |
| HHFHJ57 | B58970 | WO200055173-A1 | Cancer |
| HPRCC57 | B60201 | WO200072872-A1 | Cancer |
| HPRCC57 | B60204 | WO200072872-A1 | Cancer |
| HPRCC57 | B60206 | WO200072872-A1 | Cancer |
| HPRCC57 | B60207 | WO200072872-A1 | Cancer |
| HPRCC57 | B60208 | WO200072872-A1 | Cancer |
| HPRCC57 | B60209 | WO200072872-A1 | Cancer |
| HPRCC57 | B60210 | WO200072872-A1 | Cancer |
| HPRCC57 | B60212 | WO200072872-A1 | Cancer |
| HPRCC57 | B60214 | WO200072872-A1 | Cancer |
| HRGBQ38 | B64643 | WO200077197-A1 | Cancer |
| HRGBQ38 | B64644 | WO200077197-A1 | Cancer |
| HRGBQ38 | B64645 | WO200077197-A1 | Cancer |
| HRGBQ38 | B64646 | WO200077197-A1 | Cancer |
| HLTBT71 | B64873 | WO200077256-A1 | Cancer |
| HTEIX55 | B64953 | WO200076530-A1 | Cancer |
| HPABA51 | R75085 | ZA9403789-A | Cancer |
| HAPAT57 | R76127 | WO9517092-A | Cancer |
| HWFBD68 | R76128 | WO9517092-A | Cancer |
| HMPSA79 | R77649 | WO9532282-A1 | Cancer |
| HGBAB73 | R79008 | WO9520678-A1 | Cancer |
| HLTAW73 | R79009 | WO9520678-A1 | Cancer |
| HFCAW19 | R80095 | WO9527781-A1 | Cancer |
| HHFBT80 | R80575 | WO9524474-A1 | Cancer |
| HFKCU96 | R81309 | WO9519985-A1 | Cancer |
| HSRAW34 | R81461 | WO9605226-A1 | Cancer |
| HOSBD47 | R82686 | WO9524473-A1 | Cancer |
| HOSBH74 | R82720 | WO9524182-A1 | Cancer |
| HE8AE45 | R82987 | WO9524466-A1 | Cancer |
| HLFBE10 | R84522 | WO9524411-A1 | Cancer |
| HAGAT55 | R85650 | WO9524414-A1 | Cancer |
| HIBEC52 | R87954 | WO9530428-A1 | Cancer |
| HTEAH87 | R88390 | WO9531539-A1 | Cancer |
| HFBEH64 | R88405 | WO9531538-A1 | Cancer |
| HAFAK86 | R88419 | WO9535372-A1 | Cancer |
| HASSB35 | R88452 | WO9600242-A1 | Cancer |
| HPAAA47 | R88481 | WO9601270-A1 | Cancer |
| HJPAH22 | R90703 | WO9600297-A1 | Cancer |
| HIBCL76 | R90764 | WO9603415-A1 | Cancer |
| HIBEJ89 | R90765 | WO9603415-A1 | Neural/Sensory |
| HLFBE49 | R90919 | WO9601896-A | Cancer |
| HIBCL22 | R90989 | WO9605225-A1 | Cancer |
| HSSAW84 | R91929 | WO9612791-A1 | Cancer |
| HSNME29 | R92220 | WO9604928-A1 | Cancer |
| HSNME29 | R92753 | WO9605221-A | Cancer |
| HGBAN46 | R93086 | WO9605856-A1 | Cancer |
| HE9DR66 | R93087 | WO9605856-A1 | Cancer |
| HTPAN40 | R93118 | WO9606862-A | Cancer |
| HILBI36 | R93156 | WO9608557-A1 | Cancer |
| HJBAQ29 | R94350 | WO9609311-A1 | Cancer |
| HASAC73 | R94601 | WO9611259-A1 | Cancer |
| HPLAP22 | R94602 | WO9611259-A1 | Cancer |
| HT2SA16 | R95634 | WO9614394-A1 | Cancer |
| HLHAC42 | R95692 | WO9615806-A1 | Cancer |
| HE2CA82 | R95830 | WO9613603-A1 | Cancer |
| HTOBA30 | R95831 | WO9613603-A1 | Cancer |
| HFSBE16 | R97222 | WO9616087-A1 | Cancer |
| HHFCU19 | R97565 | WO9621736-A1 | Cancer |
| HE8AW20 | R97739 | WO9615222-A1 | Cancer |
| HSBBC75 | R97978 | WO9615147-A1 | Cancer |
| HLFBG09 | R98224 | WO9612501-A1 | Cancer |
| HHPEC49 | R98261 | WO9611946-A1 | Cancer |
| HFGAM58 | R98265 | WO9618725-A1 | Cancer |
| HUVCT01 | R98994 | WO9617931-A1 | Cancer |
| HFSAG79 | R99329 | WO9624668-A1 | Cancer |
| HATBG78 | R99353 | WO9627009-A1 | Endocrine |
| HUVEO91 | R99453 | WO9614328-A1 | Cancer |
| HPRCC57 | W00176 | WO9625422-A1 | Cancer |
| HCAAA02 | W00482 | WO9621724-A1 | Cancer |
| HETAN67 | W01097 | WO9629401-A1 | Cancer |
| HSSNB01 | W01098 | WO9629401-A1 | Cancer |
| HETJY78 | W01619 | WO9635778-A1 | Cancer |
| HPRAJ70 | W01730 | WO9639435-A1 | Cancer |
| HNFAG09 | W02151 | WO9625432-A1 | Cancer |
| HFSBC65 | W02613 | WO9618730-A1 | Cancer |
| HE2BG16 | W04247 | WO9630406-A1 | Cancer |
| HTECE68 | W05295 | WO9630524-A1 | Cancer |
| HRGBQ38 | W05313 | WO9623410-A1 | Cancer |
| HFCCE09 | W05314 | WO9623410-A1 | Cancer |
| HGOCA18 | W05315 | WO9623410-A1 | Cancer |
| HT1SB52 | W05809 | WO9634095-A1 | Cancer |
| HFGAN72 | W06124 | WO9634877-A1 | Cancer |
| HHFBT80 | W06539 | WO9639431-A1 | Cancer |
| HCNAY46 | W06545 | WO9639419-A1 | Cancer |
| HCQDM23 | W06546 | WO9639419-A1 | Digestive, Reproductive |
| HCNUB65 | W06548 | WO9639419-A1 | Cancer |
| HCNSE58 | W06550 | WO9639419-A1 | Cancer |
| HCNBB33 | W06551 | WO9639419-A1 | Cancer |
| HKLSA58 | W06552 | WO9639419-A1 | Cancer |
| HCNSD13 | W06553 | WO9639419-A1 | Cancer |
| HLQBI14 | W06575 | WO9639520-A1 | Cancer |
| HAECD08 | W07202 | WO9634891-A1 | Cancer |
| HWFBD68 | W07203 | WO9634891-A1 | Cancer |
| HAPAT57 | W07204 | WO9634891-A1 | Cancer |
| HDGNR10 | W07602 | WO9639437-A1 | Digestive, Immune/Hematopoietic, Reproductive |
| HMSDB49 | W07604 | WO9639521-A1 | Immune/Hematopoietic, Reproductive |
| HFSAG79 | W07605 | WO9639522-A1 | Cancer |
| HTOEX74 | W07606 | WO9639522-A1 | Cancer |
| HMWCF06 | W07611 | WO9639421-A1 | Cancer |
| HIBEB69 | W07617 | WO9639438-A1 | Cancer |
| HGBER32 | W07618 | WO9639434-A1 | Digestive |
| HETGQ23 | W07619 | WO9639436-A1 | Cancer |
| HE2OA95 | W07663 | WO9636709-A1 | Cancer |
| HCEGY95 | W08079 | WO9639506-A1 | Immune/Hematopoietic, Mixed Fetal, |
| | | | Neural/Sensory |
| HIBEF51 | W08101 | WO9639441-A1 | Neural/Sensory |
| HTNAD29 | W08141 | WO9639442-A1 | Cancer |
| HE9CC44 | W08142 | WO9639507-A1 | Cancer |
| HDGRC02 | W09110 | WO9639440-A1 | Cancer |
| HPTTT24 | W09111 | WO9639420-A1 | Digestive, Endocrine |
| HUVDR03 | W09404 | WO9639485-A1 | Cancer |
| HPBCB95 | W09405 | WO9639158-A1 | Cancer |
| HE9NG77 | W09408 | WO9639486-A1 | Cancer |
| HATCK89 | W09432 | WO9639509-A1 | Cancer |
| HTOEX74 | W10574 | WO9624668-A1 | Cancer |
| HOSBD47 | W11478 | WO9639515-A1 | Cancer |
| HCQAS17 | W12691 | WO9639541-A1 | Digestive, Mixed Fetal, Reproductive |
| HCACU62 | W12692 | WO9639424-A1 | Cancer |
| HAQBM60 | W12693 | WO9639418-A1 | Connective/Epithelial, Immune/Hematopoietic, |
| | | | Reproductive |
| HLTDG74 | W12695 | WO9639433-A1 | Immune/Hematopoietic |
| HODAH63 | W12696 | WO9639508-A1 | Neural/Sensory, Reproductive |
| HSSAW84 | W17043 | US5618717-A | Cancer |
| HHSAN40 | W17838 | WO9717358-A1 | Cancer |
| HTPBS22 | W19632 | WO9722623-A1 | Cancer |
| HSATU68 | W19780 | WO9725340-A1 | Cancer |
| HFCBS02 | W22408 | WO9711970-A1 | Cancer |
| HGBAN46 | W22669 | WO9731098-A1 | Cancer |
| HE9DR66 | W22670 | WO9731098-A1 | Cancer |
| HE9DR66 | W22671 | WO9731098-A1 | Cancer |
| HE9DR66 | W22672 | WO9731098-A1 | Cancer |
| HE9DR66 | W22673 | WO9731098-A1 | Cancer |
| HE9DR66 | W22674 | WO9731098-A1 | Cancer |
| HE9DR66 | W22675 | WO9731098-A1 | Cancer |
| HPMSM24 | W22732 | WO9724929-A1 | Cancer |
| HPABA51 | W22882 | US5635616-A | Cancer |
| HESAJ20 | W23663 | WO9729189-A1 | Cancer |
| HALTA54 | W24137 | WO9723640-A1 | Cancer |
| HCEMP60 | W24847 | WO9718224-A1 | Cancer |
| HFCCE09 | W25112 | US5650313-A | Cancer |
| HGOCA18 | W25113 | US5650313-A | Cancer |
| HRGBQ38 | W25114 | US5650313-A | Cancer |
| HTPAN40 | W26464 | US5654172-A | Cancer |
| HTECD31 | W27087 | WO9725349-A1 | Cancer |
| HLHDC84 | W27118 | WO9725338-A1 | Cancer |
| HTPAN08 | W27134 | WO9733899-A1 | Cancer |
| HFKET35 | W27152 | WO9734013-A1 | Cancer |
| HTTER36 | W27224 | WO9735870-A1 | Cardiovascular, Connective/Epithelial, |
| | | | Reproductive |
| HTOBH93 | W27561 | WO9727747-A1 | Cancer |
| HE6BK61 | W29291 | WO9735010-A1 | Cancer |
| HE6BK61 | W29292 | WO9735010-A1 | Cancer |
| HTOJK64 | W30193 | WO9735976-A2 | Cancer |
| HLMBA70 | W30891 | WO9735028-A1 | Immune/Hematopoietic, Mixed Fetal, Reproductive |
| HMEIP65 | W31512 | WO9732993-A1 | Cancer |
| HTTBN61 | W31517 | WO9733904-A1 | Cancer |
| HFLQA68 | W31527 | WO9737022-A1 | Cancer |
| HE8AW20 | W31692 | US5695980-A | Cancer |
| HTXEI33 | W31759 | WO9733898-A1 | Cancer |
| HCUDE60 | W31902 | WO9737021-A1 | Cancer |
| HCABA58 | W32110 | WO9738012-A1 | Cancer |
| HMEAN51 | W32112 | WO9734998-A1 | Cancer |
| HT4CC72 | W32255 | WO9734911-A1 | Immune/Hematopoietic |
| HCUDE60 | W32323 | WO9736915-A1 | Cancer |
| HSAAU35 | W33603 | WO9747742-A1 | Connective/Epithelial, Musculoskeletal, |
| | | | Reproductive |
| HETBE01 | W35802 | WO9734997-A1 | Cancer |
| HETGI70 | W35803 | WO9734997-A1 | Cancer |
| HETDK42 | W35804 | WO9734997-A1 | Cancer |
| HBJEL88 | W35904 | WO9738003-A1 | Cancer |
| HSHCL68 | W36449 | WO9735027-A1 | Cancer |
| HLTBT71 | W37002 | WO9733902-A1 | Cancer |
| HPDDO12 | W37003 | WO9733902-A1 | Cancer |
| HHPEC49 | W37799 | US5750370-A | Cancer |
| HCQAJ72 | W37844 | WO9807749-A1 | Cancer |
| HMECG71 | W37845 | WO9807749-A1 | Cancer |
| HSIEH63 | W37846 | WO9807749-A1 | Digestive |
| HBICD95 | W37847 | WO9807880-A1 | Cancer |
| HMQBM23 | W37935 | WO9808870-A1 | Cancer |
| HOEBG39 | W37946 | WO9821236-A1 | Cancer |
| HOSBH74 | W39216 | EP812916-A2 | Cancer |
| HOSBH74 | W39264 | EP812916-A2 | Cancer |
| HOSBH74 | W39265 | EP812916-A2 | Cancer |
| HOSBH74 | W39266 | EP812916-A2 | Cancer |
| HOSBH74 | W39267 | EP812916-A2 | Cancer |
| HOSBH74 | W39268 | EP812916-A2 | Cancer |
| HODAH63 | W40077 | US5728546-A | Neural/Sensory, Reproductive |
| HFBEH64 | W41362 | US5723311-A | Cancer |
| HSAAU35 | W41502 | EP812913-A2 | Connective/Epithelial, Musculoskeletal, |
| | | | Reproductive |
| HSAAU35 | W41520 | WO9747741-A1 | Connective/Epithelial, Musculoskeletal, |
| | | | Reproductive |
| HOSBH74 | W41645 | WO9747642-A1 | Cancer |
| HTSEX82 | W41938 | WO9748807-A1 | Digestive, Immune/Hematopoietic |
| HIBCL76 | W42995 | US5710019-A | Cancer |
| HIBEJ89 | W42996 | US5710019-A | Neural/Sensory |
| HILBI36 | W46518 | US5716806-A | Cancer |
| HCNAY46 | W46876 | US5733748-A | Cancer |
| HCQDM23 | W46877 | US5733748-A | Digestive, Reproductive |
| HCNUB65 | W46879 | US5733748-A | Cancer |
| HCNSE58 | W46882 | US5733748-A | Cancer |
| HCNBB33 | W46883 | US5733748-A | Cancer |
| HKLSA58 | W46884 | US5733748-A | Cancer |
| HCNSD13 | W46885 | US5733748-A | Cancer |
| HEMEM90 | W48334 | WO9807881-A1 | Cancer |
| HE9BK24 | W48335 | WO9807754-A1 | Cancer |
| HPASD50 | W48391 | WO9807735-A1 | Cancer |
| HETAN67 | W48762 | WO9812204-A1 | Cancer |
| HHFHJ57 | W49032 | WO9825957-A2 | Cancer |
| HGBER32 | W49807 | US5776729-A | Digestive |
| HATCK89 | W49826 | US5773252-A | Cancer |
| HCEPR64 | W51244 | WO9821242-A1 | Cancer |
| HPRCC57 | W52581 | WO9806844-A1 | Cancer |
| HPRCC57 | W52582 | WO9806844-A1 | Cancer |
| HPRCC57 | W52583 | WO9806844-A1 | Cancer |
| HPRCC57 | W52584 | WO9806844-A1 | Cancer |
| HPRCC57 | W52585 | WO9806844-A1 | Cancer |
| HPRCC57 | W52586 | WO9806844-A1 | Cancer |
| HPRCC57 | W52587 | WO9806844-A1 | Cancer |
| HPRCC57 | W52588 | WO9806844-A1 | Cancer |
| HPRCC57 | W52590 | WO9806844-A1 | Cancer |
| HPRCC57 | W52591 | WO9806844-A1 | Cancer |
| HPRCC57 | W52592 | WO9806844-A1 | Cancer |
| HPRCC57 | W52593 | WO9806844-A1 | Cancer |
| HPRCC57 | W52594 | WO9806844-A1 | Cancer |
| HPRCC57 | W52595 | WO9806844-A1 | Cancer |
| HPRCC57 | W52596 | WO9806844-A1 | Cancer |
| HPRCC57 | W52597 | WO9806844-A1 | Cancer |
| HPRCC57 | W52598 | WO9806844-A1 | Cancer |
| HPRCC57 | W52599 | WO9806844-A1 | Cancer |
| HDQMB53 | W52842 | WO9807862-A2 | Cancer |
| HWFBD68 | W52843 | WO9807862-A2 | Cancer |
| HPMFW51 | W53121 | WO9806859-A1 | Cancer |
| HPMFW51 | W53122 | WO9806859-A1 | Cancer |
| HPRCC57 | W53787 | WO9806844-A1 | Cancer |
| HPRCC57 | W53792 | WO9806844-A1 | Cancer |
| HPRCC57 | W53793 | WO9806844-A1 | Cancer |
| HMEEJ22 | W53897 | WO9808969-A1 | Cancer |
| HE9CC44 | W54036 | US5763214-A | Cancer |
| HMQCD14 | W55884 | WO9806733-A1 | Cancer |
| HUVDE75 | W56249 | WO9806839-A1 | Cancer |
| HCNBB33 | W56503 | WO9815624-A1 | Cancer |
| HTPBR22 | W56504 | WO9815624-A1 | Cancer |
| HETAS87 | W56505 | WO9815624-A1 | Cancer |
| HETAS87 | W56506 | WO9815624-A1 | Cancer |
| HPRAJ70 | W56641 | US5756309-A | Cancer |
| HAICL46 | W57044 | WO9811138-A1 | Cancer |
| HAECD08 | W57688 | WO9814582-A1 | Cancer |
| HAECD08 | W57691 | WO9814582-A1 | Cancer |
| HAECD08 | W57692 | WO9814582-A1 | Cancer |
| HAECD08 | W57693 | WO9814582-A1 | Cancer |
| HAECD08 | W57694 | WO9814582-A1 | Cancer |
| HAECD08 | W57695 | WO9814582-A1 | Cancer |
| HWFBD68 | W57697 | WO9814582-A1 | Cancer |
| HAPAT57 | W57698 | WO9814582-A1 | Cancer |
| HAECD08 | W57699 | WO9814582-A1 | Cancer |
| HAECD08 | W57701 | WO9814582-A1 | Cancer |
| HMSDB49 | W57881 | WO9824908-A1 | Immune/Hematopoietic, Reproductive |
| HNEDU15 | W58391 | WO9818921-A1 | Cancer |
| HE9NG77 | W58704 | US5780263-A | Cancer |
| HFSAG79 | W58900 | WO9814477-A1 | Cancer |
| HTOEX74 | W58901 | WO9814477-A1 | Cancer |
| HTOEX74 | W58902 | WO9814477-A1 | Cancer |
| HTOEX74 | W58903 | WO9814477-A1 | Cancer |
| HTOEX74 | W58904 | WO9814477-A1 | Cancer |
| HTOEX74 | W58905 | WO9814477-A1 | Cancer |
| HTOEX74 | W58906 | WO9814477-A1 | Cancer |
| HTOEX74 | W58907 | WO9814477-A1 | Cancer |
| HTOEX74 | W58908 | WO9814477-A1 | Cancer |
| HTOEX74 | W58909 | WO9814477-A1 | Cancer |
| HTOEX74 | W58910 | WO9814477-A1 | Cancer |
| HTOEX74 | W58911 | WO9814477-A1 | Cancer |
| HTOEX74 | W58912 | WO9814477-A1 | Cancer |
| HTOEX74 | W58913 | WO9814477-A1 | Cancer |
| HTOEX74 | W58914 | WO9814477-A1 | Cancer |
| HTOEX74 | W58915 | WO9814477-A1 | Cancer |
| HTOEX74 | W58916 | WO9814477-A1 | Cancer |
| HTOEX74 | W58917 | WO9814477-A1 | Cancer |
| HTOEX74 | W58918 | WO9814477-A1 | Cancer |
| HTOEX74 | W58919 | WO9814477-A1 | Cancer |
| HTOEX74 | W58920 | WO9814477-A1 | Cancer |
| HTOEX74 | W58921 | WO9814477-A1 | Cancer |
| HTOEX74 | W58922 | WO9814477-A1 | Cancer |
| HTOEX74 | W58923 | WO9814477-A1 | Cancer |
| HTOEX74 | W58924 | WO9814477-A1 | Cancer |
| HTOEX74 | W58925 | WO9814477-A1 | Cancer |
| HTOEX74 | W58926 | WO9814477-A1 | Cancer |
| HTOEX74 | W58927 | WO9814477-A1 | Cancer |
| HTOEX74 | W58928 | WO9814477-A1 | Cancer |
| HTOEX74 | W58929 | WO9814477-A1 | Cancer |
| HTOEX74 | W58930 | WO9814477-A1 | Cancer |
| HTOEX74 | W58931 | WO9814477-A1 | Cancer |
| HTOEX74 | W58932 | WO9814477-A1 | Cancer |
| HTOEX74 | W58933 | WO9814477-A1 | Cancer |
| HTOEX74 | W58934 | WO9814477-A1 | Cancer |
| HTOEX74 | W58935 | WO9814477-A1 | Cancer |
| HTOEX74 | W58936 | WO9814477-A1 | Cancer |
| HTOEX74 | W58937 | WO9814477-A1 | Cancer |
| HTOEX74 | W58938 | WO9814477-A1 | Cancer |
| HTOEX74 | W58939 | WO9814477-A1 | Cancer |
| HTOEX74 | W58940 | WO9814477-A1 | Cancer |
| HTOEX74 | W58941 | WO9814477-A1 | Cancer |
| HFSAG79 | W58942 | WO9814477-A1 | Cancer |
| HFSAG79 | W58943 | WO9814477-A1 | Cancer |
| HFSAG79 | W58944 | WO9814477-A1 | Cancer |
| HFSAG79 | W58945 | WO9814477-A1 | Cancer |
| HFSAG79 | W58946 | WO9814477-A1 | Cancer |
| HFSAG79 | W58947 | WO9814477-A1 | Cancer |
| HFSAG79 | W58948 | WO9814477-A1 | Cancer |
| HFSAG79 | W58949 | WO9814477-A1 | Cancer |
| HFSAG79 | W58950 | WO9814477-A1 | Cancer |
| HFSAG79 | W58951 | WO9814477-A1 | Cancer |
| HFSAG79 | W58952 | WO9814477-A1 | Cancer |
| HFSAG79 | W58953 | WO9814477-A1 | Cancer |
| HFSAG79 | W58954 | WO9814477-A1 | Cancer |
| HFSAG79 | W58955 | WO9814477-A1 | Cancer |
| HFSAG79 | W58956 | WO9814477-A1 | Cancer |
| HFSAG79 | W58957 | WO9814477-A1 | Cancer |
| HFSAG79 | W58958 | WO9814477-A1 | Cancer |
| HFSAG79 | W58959 | WO9814477-A1 | Cancer |
| HFSAG79 | W58960 | WO9814477-A1 | Cancer |
| HFSAG79 | W58961 | WO9814477-A1 | Cancer |
| HFSAG79 | W58962 | WO9814477-A1 | Cancer |
| HFSAG79 | W58963 | WO9814477-A1 | Cancer |
| HFSAG79 | W58964 | WO9814477-A1 | Cancer |
| HFSAG79 | W58965 | WO9814477-A1 | Cancer |
| HFSAG79 | W58966 | WO9814477-A1 | Cancer |
| HFSAG79 | W58967 | WO9814477-A1 | Cancer |
| HFSAG79 | W58968 | WO9814477-A1 | Cancer |
| HFSAG79 | W58969 | WO9814477-A1 | Cancer |
| HFSAG79 | W58970 | WO9814477-A1 | Cancer |
| HFSAG79 | W58971 | WO9814477-A1 | Cancer |
| HFSAG79 | W58972 | WO9814477-A1 | Cancer |
| HFSAG79 | W58973 | WO9814477-A1 | Cancer |
| HFSAG79 | W58974 | WO9814477-A1 | Cancer |
| HFSAG79 | W58975 | WO9814477-A1 | Cancer |
| HCEGH45 | W59666 | WO9824900-A1 | Immune/Hematopoietic, Mixed Fetal, |
| | | | Neural/Sensory |
| HHFCU19 | W59753 | US5786193-A | Cancer |
| HLMBP36 | W59872 | WO9831792-A1 | Cancer |
| HEMFI85 | W59873 | WO9831800-A2 | Cancer |
| HTXET53 | W59874 | WO9831800-A2 | Cancer |
| HBZAK03 | W59876 | WO9831800-A2 | Cancer |
| HLFBD44 | W59877 | WO9831800-A2 | Cancer |
| HEBGM49 | W59878 | WO9831800-A2 | Cancer |
| HNGBH54 | W59879 | WO9831800-A2 | Cancer |
| HSAAL25 | W59880 | WO9831800-A2 | Cancer |
| HSXCK41 | W59882 | WO9831800-A2 | Cancer |
| HFKFY79 | W59883 | WO9831800-A2 | Cancer |
| HAICH28 | W59884 | WO9831800-A2 | Cancer |
| HT1SB52 | W60045 | WO9818824-A1 | Cancer |
| HSDFB55 | W60054 | WO9816643-A1 | Cancer |
| HEBBC23 | W60607 | WO9820110-A1 | Immune/Hematopoietic, Musculoskeletal, |
| | | | Neural/Sensory |
| HTPBS22 | W61600 | WO9831798-A1 | Cancer |
| HMACR70 | W61616 | WO9831799-A2 | Cancer |
| HTEDK48 | W61617 | WO9831799-A2 | Cancer |
| HTPEF86 | W61619 | WO9831799-A2 | Cancer |
| HSBBF02 | W61620 | WO9831799-A2 | Cancer |
| HLTAH80 | W61621 | WO9831799-A2 | Cancer |
| HTPBA27 | W61622 | WO9831799-A2 | Cancer |
| HAIDQ59 | W61623 | WO9831799-A2 | Cancer |
| HHFEK40 | W61624 | WO9831799-A2 | Cancer |
| HGBGV89 | W61625 | WO9831799-A2 | Digestive |
| HUVBB80 | W61626 | WO9831799-A2 | Cancer |
| HJACE54 | W61627 | WO9831799-A2 | Cancer |
| HROAD63 | W61628 | WO9831799-A2 | Connective/Epithelial, Digestive |
| HMWGS46 | W61629 | WO9831799-A2 | Cancer |
| HNFGW06 | W61630 | WO9831799-A2 | Cancer |
| HFCAR05 | W61912 | WO9820042-A1 | Cancer |
| HHFHG78 | W62595 | WO9827932-A2 | Cancer |
| HBGBA67 | W63123 | WO9833915-A1 | Cancer |
| HPHAE52 | W63622 | WO9830694-A2 | Cancer |
| HTPCH84 | W63623 | WO9830694-A2 | Cancer |
| HEBCI67 | W64433 | WO9829438-A2 | Cancer |
| HCUDS60 | W64483 | WO9832856-A1 | Cancer |
| HPRCB54 | W64668 | WO9830693-A2 | Cancer |
| HTOCD71 | W69220 | WO9828421-A1 | Cancer |
| HSGSA61 | W69221 | WO9828420-A1 | Cancer |
| HSLAZ11 | W69229 | WO9831801-A1 | Cancer |
| HCEBJ50 | W69230 | WO9831801-A1 | Cancer |
| HMQDO20 | W69231 | WO9831806-A2 | Cancer |
| HDPMK33 | W69232 | WO9831806-A2 | Cancer |
| HMPAP73 | W69233 | WO9831806-A2 | Immune/Hematopoietic |
| HMSHH46 | W69234 | WO9831806-A2 | Cancer |
| HMAAB68 | W69235 | WO9831806-A2 | Digestive, Immune/Hematopoietic |
| HSDME38 | W69508 | WO9828422-A1 | Cancer |
| HOEBN05 | W70286 | WO9833920-A2 | Cancer |
| HDPMJ44 | W70287 | WO9835039-A1 | Cancer |
| HODAH63 | W70330 | WO9823749-A1 | Neural/Sensory, Reproductive |
| HETDW91 | W70458 | WO9838311-A1 | Cancer |
| HE8CV92 | W70459 | WO9838311-A1 | Cancer |
| HIBCL22 | W70501 | US5817477-A | Cancer |
| HKFBA76 | W70525 | WO9844111-A1 | Cancer |
| HKFBA76 | W70526 | WO9844111-A1 | Cancer |
| HMSAF34 | W70594 | WO9844118-A1 | Cancer |
| HMSAF34 | W70596 | WO9844118-A1 | Cancer |
| HMSAF34 | W70597 | WO9844118-A1 | Cancer |
| HRDCD54 | W71592 | WO9833912-A1 | Cancer |
| HIBEC52 | W73130 | US5830744-A | Cancer |
| HSRAW34 | W73635 | US5861272-A | Cancer |
| HBWAL95 | W76212 | WO9837194-A1 | Cancer |
| HTEJQ70 | W76251 | WO9831818-A2 | Cancer |
| HETBW05 | W76253 | WO9831818-A2 | Digestive, Reproductive |
| HATBG78 | W77493 | US5798223-A | Endocrine |
| HMWGS46 | W78168 | WO9856804-A1 | Cancer |
| HOUCQ17 | W78189 | WO9856804-A1 | Cancer |
| HMWGS46 | W78295 | WO9856804-A1 | Cancer |
| HLYBX88 | W79083 | WO9841629-A2 | Cancer |
| HTAAW41 | W80212 | WO9844112-A1 | Cancer |
| HOUCQ17 | W80285 | EP874050-A2 | Cancer |
| HMELK96 | W81059 | WO9856892-A1 | Cancer |
| HLJBI75 | W81071 | WO9851794-A1 | Cancer |
| HFCBS02 | W81106 | WO9844109-A1 | Cancer |
| HHPGS02 | W81576 | WO9850549-A2 | Cancer |
| HTOBH93 | W83929 | US5844081-A | Cancer |
| HSSAE30 | W84184 | WO9853069-A2 | Cancer |
| HCQAS17 | W84274 | US5861494-A | Digestive, Mixed Fetal, Reproductive |
| HRGBQ38 | W85561 | US5849286-A | Cancer |
| HFCCE09 | W85562 | US5849286-A | Cancer |
| HGOCA18 | W85563 | US5849286-A | Cancer |
| HMSIB42 | W87769 | WO9854199-A1 | Cancer |
| HTECE68 | W89575 | US5858705-A | Cancer |
| HESAJ20 | W92460 | US5871969-A | Cancer |
| HESAJ20 | W92469 | US5871969-A | Cancer |
| HTXEI33 | W92523 | US5874240-A | Cancer |
| HTXEI33 | W92524 | US5874240-A | Cancer |
| HKABO35 | W92792 | WO9854202-A1 | Cancer |
| HCEGH45 | W94074 | US5869632-A | Immune/Hematopoietic, Mixed Fetal, |
| | | | Neural/Sensory |
| HNFIR05 | W94466 | WO9900415-A1 | Cancer |
| HTTBN61 | W95538 | JP11000170-A | Cancer |
| HPFCA19 | W96192 | WO9900498-A1 | Cancer |
| HPFCA19 | W96193 | WO9900498-A1 | Cancer |
| HTSGS30 | W97350 | WO9903982-A1 | Digestive, Immune/Hematopoietic, Mixed Fetal |
| HDTAH85 | Y01098 | WO9910364-A1 | Cancer |
| HFJAB36 | Y02608 | WO9923106-A1 | Cancer |
| HDTBS70 | Y03231 | WO9909152-A1 | Cancer |
| HNGEF08 | Y03849 | WO9909198-A1 | Immune/Hematopoietic, Reproductive |
| HUKEJ46 | Y03850 | WO9909198-A1 | Digestive, Reproductive |
| HPASD50 | Y04120 | WO9909161-A1 | Cancer |
| HPASD50 | Y04121 | WO9909161-A1 | Cancer |
| HAGFE38 | Y05451 | WO9857989-A1 | Cancer |
| HFVIF40 | Y06461 | WO9931116-A1 | Cancer |
| HFCCQ50 | Y06462 | WO9931116-A1 | Cancer |
| HT4CC72 | Y06473 | WO9935262-A2 | Immune/Hematopoietic |
| HDPIE88 | Y06511 | WO9936565-A1 | Cancer |
| HWFBG79 | Y10797 | WO9907891-A1 | Cancer |
| HDGRC02 | Y13736 | US5928890-A | Cancer |
| HFCET92 | Y14078 | WO9921575-A1 | Cancer |
| HUVEO91 | Y14132 | WO9923105-A1 | Cancer |
| HUVEO91 | Y14133 | WO9923105-A1 | Cancer |
| HCABA58 | Y16587 | US5916769-A | Cancer |
| HOSBD47 | Y22320 | US5932540-A | Cancer |
| HOSBD47 | Y22321 | US5932540-A | Cancer |
| HPRCC57 | Y23761 | WO9932135-A1 | Cancer |
| HMEAA94 | Y23884 | WO9935160-A1 | Cancer |
| HL1AP03 | Y23885 | WO9935160-A1 | Cancer |
| HSYBM46 | Y23886 | WO9935160-A1 | Cancer |
| HFKBC47 | Y23887 | WO9935160-A1 | Cancer |
| HSSAW84 | Y24249 | US5929225-A | Cancer |
| HCUDE60 | Y25708 | WO9938882-A1 | Cancer |
| HHFCU19 | Y27005 | US5928924-A1 | Cancer |
| HMWJH67 | Y28640 | WO9940183-A1 | Cancer |
| HKAFV61 | Y28642 | WO9940183-A1 | Cancer |
| HETDK50 | Y28643 | WO9940183-A1 | Cancer |
| HKAEF09 | Y28644 | WO9940183-A1 | Cancer |
| HOSBD47 | Y30518 | WO9946364-A1 | Cancer |
| HOSBD47 | Y30519 | WO9946364-A1 | Cancer |
| HILBI36 | Y31242 | US5955339-A | Cancer |
| HTAEK53 | Y31810 | WO9947538-A1 | Cancer |
| HT4CC72 | Y31885 | WO9942584-A1 | Immune/Hematopoietic |
| HLMBA70 | Y32504 | US5945309-A | Immune/Hematopoietic, Mixed Fetal, Reproductive |
| HPRCC57 | Y32888 | WO9941282-A1 | Cancer |
| HPRCC57 | Y32895 | WO9941282-A1 | Cancer |
| HPRCC57 | Y32896 | WO9941282-A1 | Cancer |
| HPRCC57 | Y32897 | WO9941282-A1 | Cancer |
| HPRCC57 | Y32898 | WO9941282-A1 | Cancer |
| HPRCC57 | Y32901 | WO9941282-A1 | Cancer |
| HPRCC57 | Y32905 | WO9941282-A1 | Cancer |
| HPRCC57 | Y32916 | WO9941282-A1 | Cancer |
| HMEIP65 | Y33847 | US5952197-A | Cancer |
| HFCCQ50 | Y36339 | WO9931117-A1 | Cancer |
| HFCCQ50 | Y36342 | WO9931117-A1 | Cancer |
| HRDCD54 | Y36648 | WO9931117-A1 | Cancer |
| HRDCD54 | Y36650 | WO9931117-A1 | Cancer |
| HRDCD54 | Y36673 | WO9931117-A1 | Cancer |
| HTSEX82 | Y41161 | US5981231-A | Digestive, Immune/Hematopoietic |
| HGBAN46 | Y41163 | US5981230-A | Cancer |
| HE9DR66 | Y41164 | US5981230-A | Cancer |
| HRGBQ38 | Y42150 | US5968797-A | Cancer |
| HFCCE09 | Y42151 | US5968797-A | Cancer |
| HGOCA18 | Y42152 | US5968797-A | Cancer |
| HNFEM05 | Y42165 | WO9927078-A1 | Cancer |
| HJACE54 | Y44510 | WO200001728-A1 | Cancer |
| HKAEF92 | Y44664 | WO9962934-A1 | Cancer |
| HBZSD43 | Y45003 | WO200006589-A1 | Cancer |
| HUVEO91 | Y45032 | WO200008139-A1 | Cancer |
| HTOBH93 | Y49535 | US5977309-A | Cancer |
| HAPOR40 | Y49946 | WO9914240-A1 | Cancer |
| HHEAC71 | Y52158 | WO9920758-A1 | Connective/Epithelial, Immune/Hematopoietic |
| HCFAZ22 | Y52159 | WO9920758-A1 | Cancer |
| HT5EA78 | Y52160 | WO9920758-A1 | Connective/Epithelial, Immune/Hematopoietic |
| HDPJO39 | Y52479 | WO9940184-A1 | Cancer |
| HBICD95 | Y53061 | US5998171-A | Cancer |
| HTGED19 | Y53890 | WO9961617-A1 | Immune/Hematopoietic |
| HFPBX96 | Y53891 | WO9961617-A1 | Cancer |
| HFKCU96 | Y54900 | US5986069-A | Cancer |
| HSBBC75 | Y55748 | US5994103-A | Cancer |
| HLFBE10 | Y55750 | US5994103-A | Cancer |
| HLFBE10 | Y57166 | US5994301-A | Cancer |
| HIBCL22 | Y57167 | US5994506-A | Cancer |
| HTTER36 | Y58185 | US6004780-A | Cardiovascular, Connective/Epithelial, |
| | | | Reproductive |
| HWHGU74 | Y59247 | WO9962927-A1 | Cancer |
| HSDFB55 | Y67239 | US6008020-A | Cancer |
| HE2BG16 | Y67356 | US5998164-A | Cancer |
| HKAPI15 | Y68800 | WO200005371-A1 | Connective/Epithelial |
| HTWAF38 | Y69674 | US6013483-A | Cancer |
| HATCK89 | Y69675 | US6013477-A | Cancer |
| HAPOR40 | Y70591 | WO200015759-A1 | Cancer |
| HMUAN45 | Y70785 | WO200023572-A1 | Cancer |
| HATCK89 | Y71884 | WO200067775-A1 | Cancer |
| HKGDL36 | Y71959 | WO200066778-A1 | Cancer |
| HCUDS60 | Y72022 | WO200067793-A1 | Cancer |
| HCUDS60 | Y72023 | WO200067793-A1 | Cancer |
| HETAN67 | Y78790 | US6013469-A | Cancer |
| HDGNR10 | Y80128 | US6025154-A | Digestive, Immune/Hematopoietic, Reproductive |
| HBGBA67 | Y87779 | US6054289-A | Cancer |
| HE2CB95 | Y87780 | US6054289-A | Immune/Hematopoietic, Mixed Fetal |
| HPTTK55 | Y87782 | US6054289-A | Cancer |
| HARAO63 | Y87783 | US6054289-A | Cancer |
| HLHAR55 | Y87787 | US6054289-A | Cancer |
| HSRDG78 | Y87788 | US6054289-A | Cancer |
| HCCAA03 | Y87789 | US6054289-A | Cancer |
| HWLLM34 | Y90351 | WO200052136-A2 | Cancer |
| HA5AA37 | Y90352 | WO200052136-A2 | Cancer |
| HDPAK85 | Y90353 | WO200052136-A2 | Cancer |
| HPHAE52 | Y90357 | WO200052028-A1 | Cancer |
| HTPCH84 | Y90358 | WO200052028-A1 | Cancer |
| HMKEA94 | Y93650 | WO200036105-A1 | Cancer |
| HOEDH76 | Y93912 | WO200039166-A1 | Cancer |
| HOGCC45 | Y93951 | WO200039136-A2 | Cancer |
| HTSGS30 | Y93973 | WO200042189-A1 | Digestive, Immune/Hematopoietic, Mixed Fetal |
| HTSGS30 | Y93975 | WO200042189-A1 | Digestive, Immune/Hematopoietic, Mixed Fetal |
| HMWCF06 | Y94802 | WO200009148-A1 | Cancer |
| HE9DR66 | Y95534 | WO200040726-A1 | Cancer |
| HGBAN46 | Y95535 | WO200040726-A1 | Cancer |
| HE9DR66 | Y95563 | WO200040726-A1 | Cancer |
| HE9DR66 | Y95565 | WO200040726-A1 | Cancer |
| HE9DR66 | Y95566 | WO200040726-A1 | Cancer |
| HE9DR66 | Y95567 | WO200040726-A1 | Cancer |
| HE9DR66 | Y95568 | WO200040726-A1 | Cancer |
| HE9DR66 | Y95569 | WO200040726-A1 | Cancer |
| HE9DR66 | Y95570 | WO200040726-A1 | Cancer |
| HE9DR66 | Y95571 | WO200040726-A1 | Cancer |
| HE9DR66 | Y95572 | WO200040726-A1 | Cancer |
| HE9DR66 | Y95573 | WO200040726-A1 | Cancer |
| HE9DR66 | Y95574 | WO200040726-A1 | Cancer |
| HE9DR66 | Y95575 | WO200040726-A1 | Cancer |
| HE9DR66 | Y95576 | WO200040726-A1 | Cancer |
| HE9DR66 | Y95577 | WO200040726-A1 | Cancer |
| HE9DR66 | Y95578 | WO200040726-A1 | Cancer |
| HHEAC71 | Y95879 | WO200050459-A1 | Connective/Epithelial, Immune/Hematopoietic |
| HCFAZ22 | Y95880 | WO200050459-A1 | Cancer |
| HT5EA78 | Y95881 | WO200050459-A1 | Connective/Epithelial, Immune/Hematopoietic |
| HDPAK85 | Y96099 | WO200052135-A2 | Cancer |
| HWLLM34 | Y96100 | WO200052135-A2 | Cancer |
| HA5AA37 | Y96101 | WO200052135-A2 | Cancer |
| HAPAT57 | Y96280 | WO200028035-A1 | Cancer |
| HAPAT57 | Y96282 | WO200028035-A1 | Cancer |
| HKABZ65 | Y96962 | WO200039327-A1 | Connective/Epithelial |
| HWHGB15 | Y96963 | WO200039327-A1 | Connective/Epithelial |
| HCDDP40 | Y96964 | WO200039327-A1 | Immune/Hematopoietic, Musculoskeletal |
| HOSBD47 | Y97144 | WO200045835-A1 | Cancer |
| HOSBD47 | Y97145 | WO200045835-A1 | Cancer |
| HFITF82 | SEQ ID NO: 73 | | Immune/Hematopoietic, Musculoskeletal |
| HFITF82 | SEQ ID NO: 74 | | Immune/Hematopoietic, Musculoskeletal |
| HFITF82 | SEQ ID NO: 75 | | Immune/Hematopoietic, Musculoskeletal |
| HFITF82 | SEQ ID NO: 76 | | Immune/Hematopoietic, Musculoskeletal |
| HBZAI19 | SEQ ID NO: 77 | | Immune/Hematopoietic, Reproductive |
| HBZAI19 | SEQ ID NO: 78 | | Immune/Hematopoietic, Reproductive |
| HBZAI19 | SEQ ID NO: 79 | | Immune/Hematopoietic, Reproductive |
| HDPDI45 | SEQ ID NO: 80 | | Cancer |
| HDPDI45 | SEQ ID NO: 81 | | Cancer |
| HETHW90 | SEQ ID NO: 82 | | Cancer |
| HETHW90 | SEQ ID NO: 83 | | Cancer |
| HETHW90 | SEQ ID NO: 84 | | Cancer |
| HIBEB47 | SEQ ID NO: 85 | | Digestive, Mixed Fetal, Neural/Sensory |
| HIBEB47 | SEQ ID NO: 86 | | Digestive, Mixed Fetal, Neural/Sensory |
| HIBEB47 | SEQ ID NO: 87 | | Digestive, Mixed Fetal, Neural/Sensory |
| HIBEB47 | SEQ ID NO: 88 | | Digestive, Mixed Fetal, Neural/Sensory |
| HLHFR58 | SEQ ID NO: 89 | | Cancer |
| HLHFR58 | SEQ ID NO: 90 | | Cancer |
| HLHFR58 | SEQ ID NO: 91 | | Cancer |
| HLHFR58 | SEQ ID NO: 92 | | Cancer |
| HNGGK54 | SEQ ID NO: 93 | | Cancer |
| HNGGK54 | SEQ ID NO: 94 | | Cancer |
| HNGGK54 | SEQ ID NO: 95 | | Cancer |
| HNGGK54 | SEQ ID NO: 96 | | Cancer |
| HUSIE23 | SEQ ID NO: 97 | | Cancer |
| HUSIE23 | SEQ ID NO: 98 | | Cancer |
| HARMB79 | SEQ ID NO: 99 | | Cancer |
| HARMB79 | SEQ ID NO: 100 | | Cancer |
| HJBCY84 | SEQ ID NO: 101 | | Cancer |
| HJBCY84 | SEQ ID NO: 102 | | Cancer |
| HJBCY84 | SEQ ID NO: 103 | | Cancer |
| HCMSC92 | SEQ ID NO: 104 | | Cancer |
| HCMSC92 | SEQ ID NO: 105 | | Cancer |
| HE2AX96 | SEQ ID NO: 106 | | Mixed Fetal |
| HE2AX96 | SEQ ID NO: 107 | | Mixed Fetal |
| HE2AX96 | SEQ ID NO: 108 | | Mixed Fetal |
| HHPDV90 | SEQ ID NO: 109 | | Cancer |
| HHPDV90 | SEQ ID NO: 110 | | Cancer |
| HHPDV90 | SEQ ID NO: 111 | | Cancer |
| HT2SG64 | SEQ ID NO: 112 | | Digestive, Immune/Hematopoietic |
| HT2SG64 | SEQ ID NO: 113 | | Digestive, Immune/Hematopoietic |
| HT2SG64 | SEQ ID NO: 114 | | Digestive, Immune/Hematopoietic |
| HAGAN21 | SEQ ID NO: 115 | | Digestive, Immune/Hematopoietic, Neural/Sensory |
| HAGAN21 | SEQ ID NO: 116 | | Digestive, Immune/Hematopoietic, Neural/Sensory |
| HAGAN21 | SEQ ID NO: 117 | | Digestive, Immune/Hematopoietic, Neural/Sensory |
| HAGAN21 | SEQ ID NO: 118 | | Digestive, Immune/Hematopoietic, Neural/Sensory |
| HAGAN21 | SEQ ID NO: 119 | | Digestive, Immune/Hematopoietic, Neural/Sensory |
| HEBAH57 | SEQ ID NO: 120 | | Neural/Sensory |
| HEBAH57 | SEQ ID NO: 121 | | Neural/Sensory |
| HEBAH57 | SEQ ID NO: 122 | | Neural/Sensory |
| HETDB76 | SEQ ID NO: 123 | | Musculoskeletal, Reproductive |
| HETDB76 | SEQ ID NO: 124 | | Musculoskeletal, Reproductive |
| HETDB76 | SEQ ID NO: 125 | | Musculoskeletal, Reproductive |
| HETDB76 | SEQ ID NO: 126 | | Musculoskeletal, Reproductive |
| HE8SE91 | SEQ ID NO: 127 | | Cancer |
| HE8SE91 | SEQ ID NO: 128 | | Cancer |
| HE8SE91 | SEQ ID NO: 129 | | Cancer |
| HRGBL78 | SEQ ID NO: 130 | | Cancer |
| HRGBL78 | SEQ ID NO: 131 | | Cancer |
| HRGBL78 | SEQ ID NO: 132 | | Cancer |
| HRGBL78 | SEQ ID NO: 133 | | Cancer |
| HHFUC40 | SEQ ID NO: 134 | | Cardiovascular |
| HHFUC40 | SEQ ID NO: 135 | | Cardiovascular |
| HETCP58 | SEQ ID NO: 136 | | Immune/Hematopoietic, Reproductive |
| HETCP58 | SEQ ID NO: 137 | | Immune/Hematopoietic, Reproductive |
| HETCP58 | SEQ ID NO: 138 | | Immune/Hematopoietic, Reproductive |
| HTTBM40 | SEQ ID NO: 139 | | Cancer |
| HTTBM40 | SEQ ID NO: 140 | | Cancer |
| HTTBS64 | SEQ ID NO: 141 | | Reproductive |
| HTTBS64 | SEQ ID NO: 142 | | Reproductive |
| HTTBS64 | SEQ ID NO: 143 | | Reproductive |
| HCEVB32 | SEQ ID NO: 144 | | Cancer |
| HCEVB32 | SEQ ID NO: 145 | | Cancer |
| HCEVB32 | SEQ ID NO: 146 | | Cancer |
| HCEVB32 | SEQ ID NO: 147 | | Cancer |
| HHPFU18 | SEQ ID NO: 148 | | Cancer |
| HHPFU18 | SEQ ID NO: 149 | | Cancer |
| HPRCA90 | SEQ ID NO: 150 | | Cancer |
| HPRCA90 | SEQ ID NO: 151 | | Cancer |
| HPRCA90 | SEQ ID NO: 152 | | Cancer |
| HPRCA90 | SEQ ID NO: 153 | | Cancer |
| HPRCE33 | SEQ ID NO: 154 | | Cancer |
| HPRCE33 | SEQ ID NO: 155 | | Cancer |
| HHFFU55 | SEQ ID NO: 156 | | Cardiovascular, Immune/Hematopoietic |
| HHFFU55 | SEQ ID NO: 157 | | Cardiovascular, Immune/Hematopoietic |
| HUVDP63 | SEQ ID NO: 158 | | Cancer |
| HUVDP63 | SEQ ID NO: 159 | | Cancer |
| HUVDP63 | SEQ ID NO: 160 | | Cancer |
| HUVDP63 | SEQ ID NO: 161 | | Cancer |
| HUVDP63 | SEQ ID NO: 162 | | Cancer |
| HCEFI77 | SEQ ID NO: 163 | | Neural/Sensory |
| HCEFI77 | SEQ ID NO: 164 | | Neural/Sensory |
| HCEFI77 | SEQ ID NO: 165 | | Neural/Sensory |
| HHFDH56 | SEQ ID NO: 166 | | Cancer |
| HHFDN48 | SEQ ID NO: 167 | | Cancer |
| HHFDN48 | SEQ ID NO: 168 | | Cancer |
| HHFDN48 | SEQ ID NO: 169 | | Cancer |
| HHFDN48 | SEQ ID NO: 170 | | Cancer |
| HHFDN48 | SEQ ID NO: 171 | | Cancer |
| HHFDN67 | SEQ ID NO: 172 | | Cardiovascular |
| HHFDN67 | SEQ ID NO: 173 | | Cardiovascular |
| HHFDG51 | SEQ ID NO: 174 | | Connective/Epithelial, Musculoskeletal |
| HHFDG51 | SEQ ID NO: 175 | | Connective/Epithelial, Musculoskeletal |
| HHFDG51 | SEQ ID NO: 176 | | Connective/Epithelial, Musculoskeletal |
| HE8AO36 | SEQ ID NO: 177 | | Cancer |
| HE8AO36 | SEQ ID NO: 178 | | Cancer |
| HE8AO36 | SEQ ID NO: 179 | | Cancer |
| HTPAB57 | SEQ ID NO: 180 | | Cancer |
| HTPAB57 | SEQ ID NO: 181 | | Cancer |
| HTPAB57 | SEQ ID NO: 182 | | Cancer |
| HTPAB57 | SEQ ID NO: 183 | | Cancer |
| HFXAX45 | SEQ ID NO: 184 | | Neural/Sensory |
| HFXAX45 | SEQ ID NO: 185 | | Neural/Sensory |
| HFXAX45 | SEQ ID NO: 186 | | Neural/Sensory |
| HTLBE23 | SEQ ID NO: 187 | | Reproductive |
| HTLBE23 | SEQ ID NO: 188 | | Reproductive |
| HCQAM33 | SEQ ID NO: 189 | | Musculoskeletal, Reproductive |
| HCQAM33 | SEQ ID NO: 190 | | Musculoskeletal, Reproductive |
| HCQAM33 | SEQ ID NO: 191 | | Musculoskeletal, Reproductive |
| HCEWE17 | SEQ ID NO: 192 | | Digestive, Neural/Sensory |
| HCEWE17 | SEQ ID NO: 193 | | Digestive, Neural/Sensory |
| HCEWE17 | SEQ ID NO: 194 | | Digestive, Neural/Sensory |
| HTEGI42 | SEQ ID NO: 195 | | Cancer |
| HTEGI42 | SEQ ID NO: 196 | | Cancer |
| HTEGI42 | SEQ ID NO: 197 | | Cancer |
| HTEGI42 | SEQ ID NO: 198 | | Cancer |
| HTEGI42 | SEQ ID NO: 199 | | Cancer |
| HCEIE80 | SEQ ID NO: 200 | | Cancer |
| HCEIE80 | SEQ ID NO: 201 | | Cancer |
| HCEIE80 | SEQ ID NO: 202 | | Cancer |
| HCEIE80 | SEQ ID NO: 203 | | Cancer |
| HLMCA92 | SEQ ID NO: 204 | | Digestive, Immune/Hematopoietic, Neural/Sensory |
| HLMCA92 | SEQ ID NO: 205 | | Digestive, Immune/Hematopoietic, Neural/Sensory |
| HLMCA92 | SEQ ID NO: 206 | | Digestive, Immune/Hematopoietic, Neural/Sensory |
| HLMCA92 | SEQ ID NO: 207 | | Digestive, Immune/Hematopoietic, Neural/Sensory |
| HLHCF36 | SEQ ID NO: 208 | | Respiratory |
| HLHCF36 | SEQ ID NO: 209 | | Respiratory |
| HLHCF36 | SEQ ID NO: 210 | | Respiratory |
| HCEZR26 | SEQ ID NO: 211 | | Cancer |
| HCEZR26 | SEQ ID NO: 212 | | Cancer |
| HGBCO51 | SEQ ID NO: 213 | | Cancer |
| HGBCO51 | SEQ ID NO: 214 | | Cancer |
| HGBCO51 | SEQ ID NO: 215 | | Cancer |
| HGBCO51 | SEQ ID NO: 216 | | Cancer |
| HTABP30 | SEQ ID NO: 217 | | Cancer |
| HTABP30 | SEQ ID NO: 218 | | Cancer |
| HUKCD10 | SEQ ID NO: 219 | | Cancer |
| HUKCD10 | SEQ ID NO: 220 | | Cancer |
| HUKCD10 | SEQ ID NO: 221 | | Cancer |
| HOUHT39 | SEQ ID NO: 222 | | Cancer |
| HOUHT39 | SEQ ID NO: 223 | | Cancer |
| HOUHT39 | SEQ ID NO: 224 | | Cancer |
| HTXBN56 | SEQ ID NO: 225 | | Cancer |
| HTXBN56 | SEQ ID NO: 226 | | Cancer |
| HTXBN56 | SEQ ID NO: 227 | | Cancer |
| HETEU28 | SEQ ID NO: 228 | | Cancer |
| HETEU28 | SEQ ID NO: 229 | | Cancer |
| HODDD43 | SEQ ID NO: 230 | | Cancer |
| HODDD43 | SEQ ID NO: 231 | | Cancer |
| HODDD43 | SEQ ID NO: 232 | | Cancer |
| HPWAL61 | SEQ ID NO: 233 | | Musculoskeletal, Reproductive |
| HPWAL61 | SEQ ID NO: 234 | | Musculoskeletal, Reproductive |
| HPWAL61 | SEQ ID NO: 235 | | Musculoskeletal, Reproductive |
| HPWAL61 | SEQ ID NO: 236 | | Musculoskeletal, Reproductive |
| HTSER67 | SEQ ID NO: 237 | | Cancer |
| HTSER67 | SEQ ID NO: 238 | | Cancer |
| HMSDL37 | SEQ ID NO: 239 | | Cancer |
| HMSDL37 | SEQ ID NO: 240 | | Cancer |
| HMSDL37 | SEQ ID NO: 241 | | Cancer |
| HMSDL37 | SEQ ID NO: 242 | | Cancer |
| HSDAJ53 | SEQ ID NO: 243 | | Cancer |
| HSDAJ53 | SEQ ID NO: 244 | | Cancer |
| HSDAJ53 | SEQ ID NO: 245 | | Cancer |
| HSDAJ53 | SEQ ID NO: 246 | | Cancer |
| HEBDF05 | SEQ ID NO: 247 | | Neural/Sensory |
| HEBDF05 | SEQ ID NO: 248 | | Neural/Sensory |
| HEBDF05 | SEQ ID NO: 249 | | Neural/Sensory |
| HSQFT30 | SEQ ID NO: 250 | | Cancer |
| HSQFT30 | SEQ ID NO: 251 | | Cancer |
| HSIDX71 | SEQ ID NO: 252 | | Digestive, Neural/Sensory |
| HSIDX71 | SEQ ID NO: 253 | | Digestive, Neural/Sensory |
| HSAUA82 | SEQ ID NO: 254 | | Immune/Hematopoietic, Reproductive |
| HSAUA82 | SEQ ID NO: 255 | | Immune/Hematopoietic, Reproductive |
| HPWAY46 | SEQ ID NO: 256 | | Cancer |
| HPWAY46 | SEQ ID NO: 257 | | Cancer |
| HPWAY46 | SEQ ID NO: 258 | | Cancer |
| HSSEN70 | SEQ ID NO: 259 | | Cancer |
| HSSEN70 | SEQ ID NO: 260 | | Cancer |
| HTOHB55 | SEQ ID NO: 261 | | Cancer |
| HTOHB55 | SEQ ID NO: 262 | | Cancer |
| HTOHM15 | SEQ ID NO: 263 | | Cancer |
| HTOHM15 | SEQ ID NO: 264 | | Cancer |
| HTOHM15 | SEQ ID NO: 265 | | Cancer |
| HTOHM15 | SEQ ID NO: 266 | | Cancer |
| HHNAB56 | SEQ ID NO: 267 | | Digestive |
| HHNAB56 | SEQ ID NO: 268 | | Digestive |
| HHNAB56 | SEQ ID NO: 269 | | Digestive |
| HJABL02 | SEQ ID NO: 270 | | Cancer |
| HJABL02 | SEQ ID NO: 271 | | Cancer |
| HJACG30 | SEQ ID NO: 272 | | Immune/Hematopoietic |
| HJACG30 | SEQ ID NO: 273 | | Immune/Hematopoietic |
| HJACG30 | SEQ ID NO: 274 | | Immune/Hematopoietic |
| HTAEE28 | SEQ ID NO: 275 | | Digestive, Immune/Hematopoietic, Mixed Fetal |
| HTAEE28 | SEQ ID NO: 276 | | Digestive, Immune/Hematopoietic, Mixed Fetal |
| HTAEE28 | SEQ ID NO: 277 | | Digestive, Immune/Hematopoietic, Mixed Fetal |
| HTHBG43 | SEQ ID NO: 278 | | Immune/Hematopoietic |
| HTHBG43 | SEQ ID NO: 279 | | Immune/Hematopoietic |
| HJPCE80 | SEQ ID NO: 280 | | Cancer |
| HJPCE80 | SEQ ID NO: 281 | | Cancer |
| HJPCE80 | SEQ ID NO: 282 | | Cancer |
| HTOIZ02 | SEQ ID NO: 283 | | Cancer |
| HTOIZ02 | SEQ ID NO: 284 | | Cancer |
| HJPCR70 | SEQ ID NO: 285 | | Cancer |
| HJPCR70 | SEQ ID NO: 286 | | Cancer |
| HJPCR70 | SEQ ID NO: 287 | | Cancer |
| HJPCR70 | SEQ ID NO: 288 | | Cancer |
| HJPCP42 | SEQ ID NO: 289 | | Digestive, Immune/Hematopoietic |
| HJPCP42 | SEQ ID NO: 290 | | Digestive, Immune/Hematopoietic |
| HJPCP42 | SEQ ID NO: 291 | | Digestive, Immune/Hematopoietic |
| HJPCP42 | SEQ ID NO: 292 | | Digestive, Immune/Hematopoietic |
| HNFFD47 | SEQ ID NO: 293 | | Immune/Hematopoietic |
| HNFFD47 | SEQ ID NO: 294 | | Immune/Hematopoietic |
| HNFFD47 | SEQ ID NO: 295 | | Immune/Hematopoietic |
| HNFFI46 | SEQ ID NO: 296 | | Cancer |
| HNFFI46 | SEQ ID NO: 297 | | Cancer |
| HNFFI46 | SEQ ID NO: 298 | | Cancer |
| HNFFI46 | SEQ ID NO: 299 | | Cancer |
| HNFFI46 | SEQ ID NO: 300 | | Cancer |
| HTOIQ42 | SEQ ID NO: 301 | | Cancer |
| HTOIQ42 | SEQ ID NO: 302 | | Cancer |
| HLTDW13 | SEQ ID NO: 303 | | Cancer |
| HLTDW13 | SEQ ID NO: 304 | | Cancer |
| HLTDW13 | SEQ ID NO: 305 | | Cancer |
| HLTDW13 | SEQ ID NO: 306 | | Cancer |
| HLTDW13 | SEQ ID NO: 307 | | Cancer |
| HLTDY51 | SEQ ID NO: 308 | | Cancer |
| HLTDY51 | SEQ ID NO: 309 | | Cancer |
| HNFFZ56 | SEQ ID NO: 310 | | Cancer |
| HNFFZ56 | SEQ ID NO: 311 | | Cancer |
| HNGAV54 | SEQ ID NO: 312 | | Immune/Hematopoietic |
| HNGAV54 | SEQ ID NO: 313 | | Immune/Hematopoietic |
| HSLCA15 | SEQ ID NO: 314 | | Cancer |
| HSLCA15 | SEQ ID NO: 315 | | Cancer |
| HSLCA15 | SEQ ID NO: 316 | | Cancer |
| HSLCA15 | SEQ ID NO: 317 | | Cancer |
| HSLCA15 | SEQ ID NO: 318 | | Cancer |
| HSLCA15 | SEQ ID NO: 319 | | Cancer |
| HSLCP57 | SEQ ID NO: 320 | | Cancer |
| HSLCP57 | SEQ ID NO: 321 | | Cancer |
| HTOJP95 | SEQ ID NO: 322 | | Immune/Hematopoietic |
| HTOJP95 | SEQ ID NO: 323 | | Immune/Hematopoietic |
| HBMVI55 | SEQ ID NO: 324 | | Cancer |
| HBMVI55 | SEQ ID NO: 325 | | Cancer |
| HBMVI55 | SEQ ID NO: 326 | | Cancer |
| HBMVI55 | SEQ ID NO: 327 | | Cancer |
| HBMVI55 | SEQ ID NO: 328 | | Cancer |
| HFXBS68 | SEQ ID NO: 329 | | Neural/Sensory |
| HFXBS68 | SEQ ID NO: 330 | | Neural/Sensory |
| HFXBS68 | SEQ ID NO: 331 | | Neural/Sensory |
| HFXBS68 | SEQ ID NO: 332 | | Neural/Sensory |
| HNGBC07 | SEQ ID NO: 333 | | Immune/Hematopoietic |
| HNGBC07 | SEQ ID NO: 334 | | Immune/Hematopoietic |
| HNGBC07 | SEQ ID NO: 335 | | Immune/Hematopoietic |
| HMSFK67 | SEQ ID NO: 336 | | Cancer |
| HMSFK67 | SEQ ID NO: 337 | | Cancer |
| HMSFK67 | SEQ ID NO: 338 | | Cancer |
| HCE1P80 | SEQ ID NO: 339 | | Cancer |
| HCE1P80 | SEQ ID NO: 340 | | Cancer |
| HCE1P80 | SEQ ID NO: 341 | | Cancer |
| HOUDU29 | SEQ ID NO: 342 | | Cancer |
| HOUDU29 | SEQ ID NO: 343 | | Cancer |
| HOUDU29 | SEQ ID NO: 344 | | Cancer |
| HOUDU29 | SEQ ID NO: 345 | | Cancer |
| HOUDU29 | SEQ ID NO: 346 | | Cancer |
| HHFEC49 | SEQ ID NO: 347 | | Cancer |
| HCE3T57 | SEQ ID NO: 348 | | Immune/Hematopoietic, Neural/Sensory, |
| | | | Reproductive |
| HCE3T57 | SEQ ID NO: 349 | | Immune/Hematopoietic, Neural/Sensory, |
| | | | Reproductive |
| HCE3T57 | SEQ ID NO: 350 | | Immune/Hematopoietic, Neural/Sensory, |
| | | | Reproductive |
| HCE3T57 | SEQ ID NO: 351 | | Immune/Hematopoietic, Neural/Sensory, |
| | | | Reproductive |
| HCE3T57 | SEQ ID NO: 352 | | Immune/Hematopoietic, Neural/Sensory, |
| | | | Reproductive |
| HCE4Y07 | SEQ ID NO: 353 | | Cancer |
| HCE4Y07 | SEQ ID NO: 354 | | Cancer |
| HCE5G23 | SEQ ID NO: 355 | | Cancer |
| HCE5G23 | SEQ ID NO: 356 | | Cancer |
| HCE5G23 | SEQ ID NO: 357 | | Cancer |
| HFCEP45 | SEQ ID NO: 358 | | Neural/Sensory |
| HFCEP45 | SEQ ID NO: 359 | | Neural/Sensory |
| HFCEP45 | SEQ ID NO: 360 | | Neural/Sensory |
| HFCEP45 | SEQ ID NO: 361 | | Neural/Sensory |
| HMWEJ52 | SEQ ID NO: 362 | | Immune/Hematopoietic |
| HMWEJ52 | SEQ ID NO: 363 | | Immune/Hematopoietic |
| HMWEY26 | SEQ ID NO: 364 | | Cancer |
| HMWEY26 | SEQ ID NO: 365 | | Cancer |
| HMWEY26 | SEQ ID NO: 366 | | Cancer |
| HMWEY26 | SEQ ID NO: 367 | | Cancer |
| HMWEY26 | SEQ ID NO: 368 | | Cancer |
| HATDM46 | SEQ ID NO: 369 | | Cancer |
| HATDM46 | SEQ ID NO: 370 | | Cancer |
| HATDM46 | SEQ ID NO: 371 | | Cancer |
| HATDM46 | SEQ ID NO: 372 | | Cancer |
| HATDM46 | SEQ ID NO: 373 | | Cancer |
| HATDM46 | SEQ ID NO: 374 | | Cancer |
| HHFHD37 | SEQ ID NO: 375 | | Cardiovascular, Immune/Hematopoietic, |
| | | | Respiratory |
| HHFHD37 | SEQ ID NO: 376 | | Cardiovascular, Immune/Hematopoietic, |
| | | | Respiratory |
| HHFHI76 | SEQ ID NO: 377 | | Cancer |
| HHFHI76 | SEQ ID NO: 378 | | Cancer |
| HATDZ29 | SEQ ID NO: 379 | | Endocrine, Immune/Hematopoietic |
| HATDZ29 | SEQ ID NO: 380 | | Endocrine, Immune/Hematopoietic |
| HFVGE32 | SEQ ID NO: 381 | | Digestive, Immune/Hematopoietic |
| HFVGE32 | SEQ ID NO: 382 | | Digestive, Immune/Hematopoietic |
| HLHFE92 | SEQ ID NO: 383 | | Cancer |
| HLHFE92 | SEQ ID NO: 384 | | Cancer |
| HLHFE92 | SEQ ID NO: 385 | | Cancer |
| HMKAI25 | SEQ ID NO: 386 | | Cancer |
| HMKAI25 | SEQ ID NO: 387 | | Cancer |
| HMKAI25 | SEQ ID NO: 388 | | Cancer |
| HMKAI25 | SEQ ID NO: 389 | | Cancer |
| HMKAI25 | SEQ ID NO: 390 | | Cancer |
| HNHEI42 | SEQ ID NO: 391 | | Endocrine, Immune/Hematopoietic |
| HNHEI42 | SEQ ID NO: 392 | | Endocrine, Immune/Hematopoietic |
| HNHEI42 | SEQ ID NO: 393 | | Endocrine, Immune/Hematopoietic |
| HNHEI42 | SEQ ID NO: 394 | | Endocrine, Immune/Hematopoietic |
| HNHEI85 | SEQ ID NO: 395 | | Digestive, Immune/Hematopoietic, |
| | | | Musculoskeletal |
| HNHEI85 | SEQ ID NO: 396 | | Digestive, Immune/Hematopoietic, |
| | | | Musculoskeletal |
| HOEDE28 | SEQ ID NO: 397 | | Cancer |
| HOEDE28 | SEQ ID NO: 398 | | Cancer |
| H2CBH03 | SEQ ID NO: 399 | | Cancer |
| HTHCA18 | SEQ ID NO: 400 | | Immune/Hematopoietic |
| HTHCA18 | SEQ ID NO: 401 | | Immune/Hematopoietic |
| HTHCO79 | SEQ ID NO: 402 | | Cancer |
| HTHCO79 | SEQ ID NO: 403 | | Cancer |
| HNGFB76 | SEQ ID NO: 404 | | Digestive, Immune/Hematopoietic, Neural/Sensory |
| HNGFB76 | SEQ ID NO: 405 | | Digestive, Immune/Hematopoietic, Neural/Sensory |
| HNGFB76 | SEQ ID NO: 406 | | Digestive, Immune/Hematopoietic, Neural/Sensory |
| HNGFB76 | SEQ ID NO: 407 | | Digestive, Immune/Hematopoietic, Neural/Sensory |
| HOQBJ82 | SEQ ID NO: 408 | | Cancer |
| HOQBJ82 | SEQ ID NO: 409 | | Cancer |
| HNFHY51 | SEQ ID NO: 410 | | Immune/Hematopoietic, Reproductive |
| HNFHY51 | SEQ ID NO: 411 | | Immune/Hematopoietic, Reproductive |
| HNFHY51 | SEQ ID NO: 412 | | Immune/Hematopoietic, Reproductive |
| HNFHY51 | SEQ ID NO: 413 | | Immune/Hematopoietic, Reproductive |
| HNEEB45 | SEQ ID NO: 414 | | Immune/Hematopoietic, Mixed Fetal |
| HNEEB45 | SEQ ID NO: 415 | | Immune/Hematopoietic, Mixed Fetal |
| HSDFA44 | SEQ ID NO: 416 | | Neural/Sensory |
| HSDFA44 | SEQ ID NO: 417 | | Neural/Sensory |
| HSDFA44 | SEQ ID NO: 418 | | Neural/Sensory |
| HAGEB14 | SEQ ID NO: 419 | | Cancer |
| HAGEB14 | SEQ ID NO: 420 | | Cancer |
| HCGBE81 | SEQ ID NO: 421 | | Neural/Sensory, Reproductive |
| HCGBE81 | SEQ ID NO: 422 | | Neural/Sensory, Reproductive |
| HEOMX53 | SEQ ID NO: 423 | | Digestive, Immune/Hematopoietic, Neural/Sensory |
| HEOMX53 | SEQ ID NO: 424 | | Digestive, Immune/Hematopoietic, Neural/Sensory |
| HEOMX53 | SEQ ID NO: 425 | | Digestive, Immune/Hematopoietic, Neural/Sensory |
| HEONC95 | SEQ ID NO: 426 | | Cancer |
| HEONC95 | SEQ ID NO: 427 | | Cancer |
| HKMLP68 | SEQ ID NO: 428 | | Excretory, Mixed Fetal, Reproductive |
| HKMLP68 | SEQ ID NO: 429 | | Excretory, Mixed Fetal, Reproductive |
| HKMLP68 | SEQ ID NO: 430 | | Excretory, Mixed Fetal, Reproductive |
| HMWIG83 | SEQ ID NO: 431 | | Cancer |
| HMWIG83 | SEQ ID NO: 432 | | Cancer |
| HMSKH19 | SEQ ID NO: 433 | | Cancer |
| HMSKH19 | SEQ ID NO: 434 | | Cancer |
| HMSKH19 | SEQ ID NO: 435 | | Cancer |
| HFAME37 | SEQ ID NO: 436 | | Neural/Sensory |
| HFAME37 | SEQ ID NO: 437 | | Neural/Sensory |
| HFAME37 | SEQ ID NO: 438 | | Neural/Sensory |
| HFXFG45 | SEQ ID NO: 439 | | Immune/Hematopoietic, Neural/Sensory |
| HFXFG45 | SEQ ID NO: 440 | | Immune/Hematopoietic, Neural/Sensory |
| HFXFG45 | SEQ ID NO: 441 | | Immune/Hematopoietic, Neural/Sensory |
| HFXFG45 | SEQ ID NO: 442 | | Immune/Hematopoietic, Neural/Sensory |
| HFXFH04 | SEQ ID NO: 443 | | Immune/Hematopoietic, Neural/Sensory |
| HFXFH04 | SEQ ID NO: 444 | | Immune/Hematopoietic, Neural/Sensory |
| HFXFH04 | SEQ ID NO: 445 | | Immune/Hematopoietic, Neural/Sensory |
| HFXFH04 | SEQ ID NO: 446 | | Immune/Hematopoietic, Neural/Sensory |
| HGCAC66 | SEQ ID NO: 447 | | Cancer |
| HGCAC66 | SEQ ID NO: 448 | | Cancer |
| HSSJF55 | SEQ ID NO: 449 | | Musculoskeletal |
| HSSJF55 | SEQ ID NO: 450 | | Musculoskeletal |
| HFXHM17 | SEQ ID NO: 451 | | Cancer |
| HFXHM17 | SEQ ID NO: 452 | | Cancer |
| HFXHM17 | SEQ ID NO: 453 | | Cancer |
| HFXHM17 | SEQ ID NO: 454 | | Cancer |
| HOSFQ65 | SEQ ID NO: 455 | | Cancer |
| HOSFQ65 | SEQ ID NO: 456 | | Cancer |
| HOSFQ65 | SEQ ID NO: 457 | | Cancer |
| HOSFQ65 | SEQ ID NO: 458 | | Cancer |
| HOSFQ65 | SEQ ID NO: 459 | | Cancer |
| HKGAS32 | SEQ ID NO: 460 | | Connective/Epithelial, Neural/Sensory |
| HKGAS32 | SEQ ID NO: 461 | | Connective/Epithelial, Neural/Sensory |
| HKGAU45 | SEQ ID NO: 462 | | Immune/Hematopoietic |
| HKGAU45 | SEQ ID NO: 463 | | Immune/Hematopoietic |
| HKGAU45 | SEQ ID NO: 464 | | Immune/Hematopoietic |
| HKGBH24 | SEQ ID NO: 465 | | Cancer |
| HKGBH24 | SEQ ID NO: 466 | | Cancer |
| HKGBH24 | SEQ ID NO: 467 | | Cancer |
| HKGBS01 | SEQ ID NO: 468 | | Cancer |
| HKGBS01 | SEQ ID NO: 469 | | Cancer |
| HKGBS01 | SEQ ID NO: 470 | | Cancer |
| HACCL63 | SEQ ID NO: 471 | | Cancer |
| HACCL63 | SEQ ID NO: 472 | | Cancer |
| HACCL63 | SEQ ID NO: 473 | | Cancer |
| HACCL63 | SEQ ID NO: 474 | | Cancer |
| HFIIN69 | SEQ ID NO: 475 | | Musculoskeletal, Neural/Sensory, Reproductive |
| HFIIN69 | SEQ ID NO: 476 | | Musculoskeletal, Neural/Sensory, Reproductive |
| HFIIN69 | SEQ ID NO: 477 | | Musculoskeletal, Neural/Sensory, Reproductive |
| HFIIZ70 | SEQ ID NO: 478 | | Cancer |
| HFIIZ70 | SEQ ID NO: 479 | | Cancer |
| HMIAJ30 | SEQ ID NO: 480 | | Cancer |
| HMIAJ30 | SEQ ID NO: 481 | | Cancer |
| HMIAJ30 | SEQ ID NO: 482 | | Cancer |
| HMIAJ30 | SEQ ID NO: 483 | | Cancer |
| HMIAV73 | SEQ ID NO: 484 | | Cancer |
| HMIAV73 | SEQ ID NO: 485 | | Cancer |
| HMIAV73 | SEQ ID NO: 486 | | Cancer |
| HMIAV73 | SEQ ID NO: 487 | | Cancer |
| HAPOD80 | SEQ ID NO: 488 | | Cancer |
| HISBL03 | SEQ ID NO: 489 | | Cancer |
| HISBL03 | SEQ ID NO: 490 | | Cancer |
| HISBL03 | SEQ ID NO: 491 | | Cancer |
| HISBL03 | SEQ ID NO: 492 | | Cancer |
| HISBL03 | SEQ ID NO: 493 | | Cancer |
| HISBL03 | SEQ ID NO: 494 | | Cancer |
| HISBL03 | SEQ ID NO: 495 | | Cancer |
| HMICK94 | SEQ ID NO: 496 | | Cancer |
| HMICK94 | SEQ ID NO: 497 | | Cancer |
| HMICK94 | SEQ ID NO: 498 | | Cancer |
| HISBF60 | SEQ ID NO: 499 | | Cancer |
| HISBF60 | SEQ ID NO: 500 | | Cancer |
| HISBF60 | SEQ ID NO: 501 | | Cancer |
| HISBF60 | SEQ ID NO: 502 | | Cancer |
| HISBF60 | SEQ ID NO: 503 | | Cancer |
| HMVAV54 | SEQ ID NO: 504 | | Immune/Hematopoietic |
| HMVAV54 | SEQ ID NO: 505 | | Immune/Hematopoietic |
| HMVAV54 | SEQ ID NO: 506 | | Immune/Hematopoietic |
| HMVAV54 | SEQ ID NO: 507 | | Immune/Hematopoietic |
| HMVAV54 | SEQ ID NO: 508 | | Immune/Hematopoietic |
| HPICB53 | SEQ ID NO: 509 | | Cancer |
| HPICB53 | SEQ ID NO: 510 | | Cancer |
| HPICC86 | SEQ ID NO: 511 | | Reproductive |
| HPICC86 | SEQ ID NO: 512 | | Reproductive |
| HPICC86 | SEQ ID NO: 513 | | Reproductive |
| HPICC86 | SEQ ID NO: 514 | | Reproductive |
| HPICC86 | SEQ ID NO: 515 | | Reproductive |
| HPJAP43 | SEQ ID NO: 516 | | Cancer |
| HPJAP43 | SEQ ID NO: 517 | | Cancer |
| HPJAP43 | SEQ ID NO: 518 | | Cancer |
| HPJCG42 | SEQ ID NO: 519 | | Immune/Hematopoietic, Reproductive |
| HPJCG42 | SEQ ID NO: 520 | | Immune/Hematopoietic, Reproductive |
| HPJCG42 | SEQ ID NO: 521 | | Immune/Hematopoietic, Reproductive |
| HPJCG42 | SEQ ID NO: 522 | | Immune/Hematopoietic, Reproductive |
| HPJCG42 | SEQ ID NO: 523 | | Immune/Hematopoietic, Reproductive |
| HPJBK11 | SEQ ID NO: 524 | | Cardiovascular, Neural/Sensory, Reproductive |
| HPJBK11 | SEQ ID NO: 525 | | Cardiovascular, Neural/Sensory, Reproductive |
| HPJBK11 | SEQ ID NO: 526 | | Cardiovascular, Neural/Sensory, Reproductive |
| HPJBK12 | SEQ ID NO: 527 | | Reproductive |
| HPJBK12 | SEQ ID NO: 528 | | Reproductive |
| HPJBK12 | SEQ ID NO: 529 | | Reproductive |
| HPJBK12 | SEQ ID NO: 530 | | Reproductive |
| HPJCT08 | SEQ ID NO: 531 | | Connective/Epithelial, Reproductive |
| HPJCT08 | SEQ ID NO: 532 | | Connective/Epithelial, Reproductive |
| HPJCT08 | SEQ ID NO: 533 | | Connective/Epithelial, Reproductive |
| HT4ES80 | SEQ ID NO: 534 | | Cancer |
| HT4ES80 | SEQ ID NO: 535 | | Cancer |
| HT4ES80 | SEQ ID NO: 536 | | Cancer |
| HNTNB49 | SEQ ID NO: 537 | | Cancer |
| HNTNB49 | SEQ ID NO: 538 | | Cancer |
| HNTRS57 | SEQ ID NO: 539 | | Cancer |
| HNTRS57 | SEQ ID NO: 540 | | Cancer |
| HNTRS57 | SEQ ID NO: 541 | | Cancer |
| HNTRS57 | SEQ ID NO: 542 | | Cancer |
| HNTRS57 | SEQ ID NO: 543 | | Cancer |
| HNTSL47 | SEQ ID NO: 544 | | Cardiovascular, Digestive |
| HNTSL47 | SEQ ID NO: 545 | | Cardiovascular, Digestive |
| HNTSL47 | SEQ ID NO: 546 | | Cardiovascular, Digestive |
| HBJLR70 | SEQ ID NO: 547 | | Immune/Hematopoietic, Neural/Sensory |
| HBJLR70 | SEQ ID NO: 548 | | Immune/Hematopoietic, Neural/Sensory |
| HNTSY18 | SEQ ID NO: 549 | | Cardiovascular, Reproductive |
| HNTSY18 | SEQ ID NO: 550 | | Cardiovascular, Reproductive |
| HBHME51 | SEQ ID NO: 551 | | Reproductive, Respiratory |
| HBHME51 | SEQ ID NO: 552 | | Reproductive, Respiratory |
| HBHME51 | SEQ ID NO: 553 | | Reproductive, Respiratory |
| HMCHR48 | SEQ ID NO: 554 | | Connective/Epithelial, Immune/Hematopoietic, |
| | | | Reproductive |
| HMCHR48 | SEQ ID NO: 555 | | Connective/Epithelial, Immune/Hematopoietic, |
| | | | Reproductive |
| HMCHR48 | SEQ ID NO: 556 | | Connective/Epithelial, Immune/Hematopoietic, |
| | | | Reproductive |
| HMCIJ07 | SEQ ID NO: 557 | | Immune/Hematopoietic |
| HMCIJ07 | SEQ ID NO: 558 | | Immune/Hematopoietic |
| HSIFL06 | SEQ ID NO: 559 | | Cancer |
| HSIFL06 | SEQ ID NO: 560 | | Cancer |
| HMZME33 | SEQ ID NO: 561 | | Connective/Epithelial, Digestive |
| HMZME33 | SEQ ID NO: 562 | | Connective/Epithelial, Digestive |
| HMZMF54 | SEQ ID NO: 563 | | Digestive |
| HMZMF54 | SEQ ID NO: 564 | | Digestive |
| HMZMF54 | SEQ ID NO: 565 | | Digestive |
| HMVCQ82 | SEQ ID NO: 566 | | Immune/Hematopoietic |
| HMVCQ82 | SEQ ID NO: 567 | | Immune/Hematopoietic |
| HMVCQ82 | SEQ ID NO: 568 | | Immune/Hematopoietic |
| HMVDP35 | SEQ ID NO: 569 | | Immune/Hematopoietic, Reproductive |
| HMVDP35 | SEQ ID NO: 570 | | Immune/Hematopoietic, Reproductive |
| HMVDP35 | SEQ ID NO: 571 | | Immune/Hematopoietic, Reproductive |
| HMVDF54 | SEQ ID NO: 572 | | Cancer |
| HMVDF54 | SEQ ID NO: 573 | | Cancer |
| HMVDF54 | SEQ ID NO: 574 | | Cancer |
| HROBM46 | SEQ ID NO: 575 | | Connective/Epithelial, Digestive |
| HROBM46 | SEQ ID NO: 576 | | Connective/Epithelial, Digestive |
| HCNDR47 | SEQ ID NO: 577 | | Cancer |
| HCNDR47 | SEQ ID NO: 578 | | Cancer |
| HCNDR47 | SEQ ID NO: 579 | | Cancer |
| HCNDV12 | SEQ ID NO: 580 | | Digestive, Reproductive |
| HCNDV12 | SEQ ID NO: 581 | | Digestive, Reproductive |
| HCNDV12 | SEQ ID NO: 582 | | Digestive, Reproductive |
| HSODE04 | SEQ ID NO: 583 | | Digestive |
| HSODE04 | SEQ ID NO: 584 | | Digestive |
| HBFMC03 | SEQ ID NO: 585 | | Digestive, Musculoskeletal, Reproductive |
| HBFMC03 | SEQ ID NO: 586 | | Digestive, Musculoskeletal, Reproductive |
| HHSFB67 | SEQ ID NO: 587 | | Neural/Sensory |
| HHSFB67 | SEQ ID NO: 588 | | Neural/Sensory |
| HHSFB67 | SEQ ID NO: 589 | | Neural/Sensory |
| HHSFB67 | SEQ ID NO: 590 | | Neural/Sensory |
| HHSGW69 | SEQ ID NO: 591 | | Cancer |
| HHSGW69 | SEQ ID NO: 592 | | Cancer |
| HHSGW69 | SEQ ID NO: 593 | | Cancer |
| HCLCJ15 | SEQ ID NO: 594 | | Cancer |
| HCLCJ15 | SEQ ID NO: 595 | | Cancer |
| HCLCJ15 | SEQ ID NO: 596 | | Cancer |
| HCLCJ15 | SEQ ID NO: 597 | | Cancer |
| HSLJG37 | SEQ ID NO: 598 | | Cancer |
| HSLJG37 | SEQ ID NO: 599 | | Cancer |
| HSLJG37 | SEQ ID NO: 600 | | Cancer |
| HWLEC41 | SEQ ID NO: 601 | | Cancer |
| HWLEC41 | SEQ ID NO: 602 | | Cancer |
| HWLEC41 | SEQ ID NO: 603 | | Cancer |
| HSXEQ06 | SEQ ID NO: 604 | | Cancer |
| HSXEQ06 | SEQ ID NO: 605 | | Cancer |
| HSXEQ06 | SEQ ID NO: 606 | | Cancer |
| HEEAA16 | SEQ ID NO: 607 | | Cancer |
| HEEAA16 | SEQ ID NO: 608 | | Cancer |
| HEEAA16 | SEQ ID NO: 609 | | Cancer |
| HEEAM62 | SEQ ID NO: 610 | | Reproductive |
| HEEAM62 | SEQ ID NO: 611 | | Reproductive |
| HEEAM62 | SEQ ID NO: 612 | | Reproductive |
| HEEAM62 | SEQ ID NO: 613 | | Reproductive |
| HNHKL90 | SEQ ID NO: 614 | | Immune/Hematopoietic |
| HNHKL90 | SEQ ID NO: 615 | | Immune/Hematopoietic |
| HNHKL90 | SEQ ID NO: 616 | | Immune/Hematopoietic |
| HWLFQ64 | SEQ ID NO: 617 | | Digestive |
| HWLFQ64 | SEQ ID NO: 618 | | Digestive |
| HWLFR02 | SEQ ID NO: 619 | | Cancer |
| HWLFR02 | SEQ ID NO: 620 | | Cancer |
| HWLFR02 | SEQ ID NO: 621 | | Cancer |
| HBKED12 | SEQ ID NO: 622 | | Cancer |
| HBKED12 | SEQ ID NO: 623 | | Cancer |
| HBKED12 | SEQ ID NO: 624 | | Cancer |
| HBKED12 | SEQ ID NO: 625 | | Cancer |
| HBKED12 | SEQ ID NO: 626 | | Cancer |
| HWLFJ10 | SEQ ID NO: 627 | | Cancer |
| HWLFJ10 | SEQ ID NO: 628 | | Cancer |
| HCRNO87 | SEQ ID NO: 629 | | Cancer |
| HCRNO87 | SEQ ID NO: 630 | | Cancer |
| HCRNO87 | SEQ ID NO: 631 | | Cancer |
| HCRNO87 | SEQ ID NO: 632 | | Cancer |
| HWLJX42 | SEQ ID NO: 633 | | Cancer |
| HWLJX42 | SEQ ID NO: 634 | | Cancer |
| HWLJX42 | SEQ ID NO: 635 | | Cancer |
| HSPBY63 | SEQ ID NO: 636 | | Digestive |
| HSPBY63 | SEQ ID NO: 637 | | Digestive |
| HSPBY63 | SEQ ID NO: 638 | | Digestive |
| HAPSO15 | SEQ ID NO: 639 | | Cancer |
| HAPSO15 | SEQ ID NO: 640 | | Cancer |
| HAPSO15 | SEQ ID NO: 641 | | Cancer |
| HE8QG24 | SEQ ID NO: 642 | | Mixed Fetal |
| HE8QG24 | SEQ ID NO: 643 | | Mixed Fetal |
| HE8QG24 | SEQ ID NO: 644 | | Mixed Fetal |
| HE8QV43 | SEQ ID NO: 645 | | Cancer |
| HE8QV43 | SEQ ID NO: 646 | | Cancer |
| HE8QV43 | SEQ ID NO: 647 | | Cancer |
| HE8QV43 | SEQ ID NO: 648 | | Cancer |
| HE9QN39 | SEQ ID NO: 649 | | Cancer |
| HE9QN39 | SEQ ID NO: 650 | | Cancer |
| HE9RO44 | SEQ ID NO: 651 | | Immune/Hematopoietic, Mixed Fetal |
| HE9RO44 | SEQ ID NO: 652 | | Immune/Hematopoietic, Mixed Fetal |
| HE9RO44 | SEQ ID NO: 653 | | Immune/Hematopoietic, Mixed Fetal |
| HE9SE18 | SEQ ID NO: 654 | | Digestive, Mixed Fetal |
| HE9SE18 | SEQ ID NO: 655 | | Digestive, Mixed Fetal |
| HE9SE18 | SEQ ID NO: 656 | | Digestive, Mixed Fetal |
| HISCV60 | SEQ ID NO: 657 | | Digestive |
| HISCV60 | SEQ ID NO: 658 | | Digestive |
| HE8UT25 | SEQ ID NO: 659 | | Mixed Fetal |
| HE8UT25 | SEQ ID NO: 660 | | Mixed Fetal |
| HE8UT25 | SEQ ID NO: 661 | | Mixed Fetal |
| HE8UY36 | SEQ ID NO: 662 | | Cancer |
| HE8UY36 | SEQ ID NO: 663 | | Cancer |
| HNHNT13 | SEQ ID NO: 664 | | Immune/Hematopoietic |
| HNHNT13 | SEQ ID NO: 665 | | Immune/Hematopoietic |
| HNHNT13 | SEQ ID NO: 666 | | Immune/Hematopoietic |
| HODEB50 | SEQ ID NO: 667 | | Reproductive |
| HODEB50 | SEQ ID NO: 668 | | Reproductive |
| HODEB50 | SEQ ID NO: 669 | | Reproductive |
| HNGMJ91 | SEQ ID NO: 670 | | Immune/Hematopoietic |
| HNGMJ91 | SEQ ID NO: 671 | | Immune/Hematopoietic |
| HNGMJ91 | SEQ ID NO: 672 | | Immune/Hematopoietic |
| HNGNB69 | SEQ ID NO: 673 | | Immune/Hematopoietic |
| HODFW41 | SEQ ID NO: 674 | | Reproductive |
| HODFW41 | SEQ ID NO: 675 | | Reproductive |
| HNGOI12 | SEQ ID NO: 676 | | Immune/Hematopoietic |
| HNGOI12 | SEQ ID NO: 677 | | Immune/Hematopoietic |
| HNGOI12 | SEQ ID NO: 678 | | Immune/Hematopoietic |
| HNGPM78 | SEQ ID NO: 679 | | Immune/Hematopoietic, Neural/Sensory |
| HNGPM78 | SEQ ID NO: 680 | | Immune/Hematopoietic, Neural/Sensory |
| HYASC80 | SEQ ID NO: 681 | | Cancer |
| HYASC80 | SEQ ID NO: 682 | | Cancer |
| HWLHM66 | SEQ ID NO: 683 | | Cancer |
| HWLHM66 | SEQ ID NO: 684 | | Cancer |
| HWLHM66 | SEQ ID NO: 685 | | Cancer |
| HWLHM66 | SEQ ID NO: 686 | | Cancer |
| HBBBC71 | SEQ ID NO: 687 | | Cancer |
| HBBBC71 | SEQ ID NO: 688 | | Cancer |
| HBBBC71 | SEQ ID NO: 689 | | Cancer |
| HLJBF86 | SEQ ID NO: 690 | | Cancer |
| HLJBF86 | SEQ ID NO: 691 | | Cancer |
| HLJBF86 | SEQ ID NO: 692 | | Cancer |
| HLJBJ61 | SEQ ID NO: 693 | | Cancer |
| HLJBJ61 | SEQ ID NO: 694 | | Cancer |
| HHBCS39 | SEQ ID NO: 695 | | Cancer |
| HHBCS39 | SEQ ID NO: 696 | | Cancer |
| HHBCS39 | SEQ ID NO: 697 | | Cancer |
| HLJEA01 | SEQ ID NO: 698 | | Respiratory |
| HLJEA01 | SEQ ID NO: 699 | | Respiratory |
| HLEDB16 | SEQ ID NO: 700 | | Cancer |
| HOGCK63 | SEQ ID NO: 701 | | Cancer |
| HOGCK63 | SEQ ID NO: 702 | | Cancer |
| HOFMQ33 | SEQ ID NO: 703 | | Reproductive |
| HOFMQ33 | SEQ ID NO: 704 | | Reproductive |
| HOFMQ33 | SEQ ID NO: 705 | | Reproductive |
| HOFMQ33 | SEQ ID NO: 706 | | Reproductive |
| HOFMT75 | SEQ ID NO: 707 | | Reproductive |
| HOFMT75 | SEQ ID NO: 708 | | Reproductive |
| HOFMT75 | SEQ ID NO: 709 | | Reproductive |
| HOFMT75 | SEQ ID NO: 710 | | Reproductive |
| HOGCS52 | SEQ ID NO: 711 | | Cancer |
| HOGCS52 | SEQ ID NO: 712 | | Cancer |
| HOGCS52 | SEQ ID NO: 713 | | Cancer |
| HOFNM53 | SEQ ID NO: 714 | | Reproductive |
| HOFNM53 | SEQ ID NO: 715 | | Reproductive |
| HOFNM53 | SEQ ID NO: 716 | | Reproductive |
| HOFNM53 | SEQ ID NO: 717 | | Reproductive |
| HOFOB27 | SEQ ID NO: 718 | | Cancer |
| HOFOB27 | SEQ ID NO: 719 | | Cancer |
| HOFOB27 | SEQ ID NO: 720 | | Cancer |
| HOFOB27 | SEQ ID NO: 721 | | Cancer |
| HOFOC33 | SEQ ID NO: 722 | | Reproductive |
| HOFOC33 | SEQ ID NO: 723 | | Reproductive |
| HOFOC33 | SEQ ID NO: 724 | | Reproductive |
| HOFOC33 | SEQ ID NO: 725 | | Reproductive |
| HOFOC33 | SEQ ID NO: 726 | | Reproductive |
| HOFOC33 | SEQ ID NO: 727 | | Reproductive |
| HOFOC73 | SEQ ID NO: 728 | | Cancer |
| HOFOC73 | SEQ ID NO: 729 | | Cancer |
| HOFOC73 | SEQ ID NO: 730 | | Cancer |
| HOFOC73 | SEQ ID NO: 731 | | Cancer |
| HNTAC64 | SEQ ID NO: 732 | | Cancer |
| HNTAC64 | SEQ ID NO: 733 | | Cancer |
| HNTAC64 | SEQ ID NO: 734 | | Cancer |
| HNTAC64 | SEQ ID NO: 735 | | Cancer |
| HDTBD53 | SEQ ID NO: 736 | | Cancer |
| HDTBD53 | SEQ ID NO: 737 | | Cancer |
| HDTAQ57 | SEQ ID NO: 738 | | Cancer |
| HDTAQ57 | SEQ ID NO: 739 | | Cancer |
| HDTAR06 | SEQ ID NO: 740 | | Cancer |
| HDTAR06 | SEQ ID NO: 741 | | Cancer |
| HDPML23 | SEQ ID NO: 742 | | Immune/Hematopoietic, Neural/Sensory |
| HDPML23 | SEQ ID NO: 743 | | Immune/Hematopoietic, Neural/Sensory |
| HDPML23 | SEQ ID NO: 744 | | Immune/Hematopoietic, Neural/Sensory |
| HDPML23 | SEQ ID NO: 745 | | Immune/Hematopoietic, Neural/Sensory |
| HDPML23 | SEQ ID NO: 746 | | Immune/Hematopoietic, Neural/Sensory |
| HDPMM88 | SEQ ID NO: 747 | | Cancer |
| HDPMM88 | SEQ ID NO: 748 | | Cancer |
| HDPMM88 | SEQ ID NO: 749 | | Cancer |
| HDPMM88 | SEQ ID NO: 750 | | Cancer |
| HDPMM88 | SEQ ID NO: 751 | | Cancer |
| HDPMM88 | SEQ ID NO: 752 | | Cancer |
| HDPMM88 | SEQ ID NO: 753 | | Cancer |
| HDPMS12 | SEQ ID NO: 754 | | Cancer |
| HDPMS12 | SEQ ID NO: 755 | | Cancer |
| HDPMS12 | SEQ ID NO: 756 | | Cancer |
| HDPMS12 | SEQ ID NO: 757 | | Cancer |
| HDPMS12 | SEQ ID NO: 758 | | Cancer |
| HDPMS12 | SEQ ID NO: 759 | | Cancer |
| HDPAP35 | SEQ ID NO: 760 | | Excretory, Immune/Hematopoietic, Neural/Sensory |
| HDPAP35 | SEQ ID NO: 761 | | Excretory, Immune/Hematopoietic, Neural/Sensory |
| HDPAP35 | SEQ ID NO: 762 | | Excretory, Immune/Hematopoietic, Neural/Sensory |
| HDPAP35 | SEQ ID NO: 763 | | Excretory, Immune/Hematopoietic, Neural/Sensory |
| HDPAQ55 | SEQ ID NO: 764 | | Digestive, Immune/Hematopoietic, Reproductive |
| HDPAQ55 | SEQ ID NO: 765 | | Digestive, Immune/Hematopoietic, Reproductive |
| HDPAQ55 | SEQ ID NO: 766 | | Digestive, Immune/Hematopoietic, Reproductive |
| HDPAQ55 | SEQ ID NO: 767 | | Digestive, Immune/Hematopoietic, Reproductive |
| HKAAV61 | SEQ ID NO: 768 | | Connective/Epithelial |
| HKAAV61 | SEQ ID NO: 769 | | Connective/Epithelial |
| HKAAV61 | SEQ ID NO: 770 | | Connective/Epithelial |
| HDPCJ43 | SEQ ID NO: 771 | | Cancer |
| HDPCJ43 | SEQ ID NO: 772 | | Cancer |
| HDPCJ43 | SEQ ID NO: 773 | | Cancer |
| HDPCJ43 | SEQ ID NO: 774 | | Cancer |
| HKACM93 | SEQ ID NO: 775 | | Cancer |
| HKACM93 | SEQ ID NO: 776 | | Cancer |
| HKACM93 | SEQ ID NO: 777 | | Cancer |
| HKACM93 | SEQ ID NO: 778 | | Cancer |
| HKAFT66 | SEQ ID NO: 779 | | Connective/Epithelial, Digestive, |
| | | | Immune/Hematopoietic |
| HKAFT66 | SEQ ID NO: 780 | | Connective/Epithelial, Digestive, |
| | | | Immune/Hematopoietic |
| HKAFT66 | SEQ ID NO: 781 | | Connective/Epithelial, Digestive, |
| | | | Immune/Hematopoietic |
| HHEMM74 | SEQ ID NO: 782 | | Cancer |
| HHEMM74 | SEQ ID NO: 783 | | Cancer |
| HHEMM74 | SEQ ID NO: 784 | | Cancer |
| HHEMM74 | SEQ ID NO: 785 | | Cancer |
| HAMFC93 | SEQ ID NO: 786 | | Cancer |
| HAMFC93 | SEQ ID NO: 787 | | Cancer |
| HAMFC93 | SEQ ID NO: 788 | | Cancer |
| HSYAZ50 | SEQ ID NO: 789 | | Cancer |
| HSYAZ50 | SEQ ID NO: 790 | | Cancer |
| HSYAZ50 | SEQ ID NO: 791 | | Cancer |
| HSYAZ50 | SEQ ID NO: 792 | | Cancer |
| HLWAX42 | SEQ ID NO: 793 | | Cancer |
| HLWAX42 | SEQ ID NO: 794 | | Cancer |
| HLWAX42 | SEQ ID NO: 795 | | Cancer |
| HLWAZ70 | SEQ ID NO: 796 | | Cancer |
| HLWAZ70 | SEQ ID NO: 797 | | Cancer |
| HLWAZ70 | SEQ ID NO: 798 | | Cancer |
| HLWAZ70 | SEQ ID NO: 799 | | Cancer |
| HLWBG83 | SEQ ID NO: 800 | | Cancer |
| HLWBG83 | SEQ ID NO: 801 | | Cancer |
| HLWBG83 | SEQ ID NO: 802 | | Cancer |
| HLWBG83 | SEQ ID NO: 803 | | Cancer |
| HLWBG83 | SEQ ID NO: 804 | | Cancer |
| HLWBH18 | SEQ ID NO: 805 | | Reproductive |
| HLWBH18 | SEQ ID NO: 806 | | Reproductive |
| HRABS65 | SEQ ID NO: 807 | | Cancer |
| HRABV43 | SEQ ID NO: 808 | | Cancer |
| HRABV43 | SEQ ID NO: 809 | | Cancer |
| HRABV43 | SEQ ID NO: 810 | | Cancer |
| HHEPG23 | SEQ ID NO: 811 | | Cancer |
| HHEPG23 | SEQ ID NO: 812 | | Cancer |
| HHEPG23 | SEQ ID NO: 813 | | Cancer |
| HHEPJ23 | SEQ ID NO: 814 | | Cancer |
| HHEPJ23 | SEQ ID NO: 815 | | Cancer |
| HDPIW06 | SEQ ID NO: 816 | | Digestive, Immune/Hematopoietic, Neural/Sensory |
| HDPIW06 | SEQ ID NO: 817 | | Digestive, Immune/Hematopoietic, Neural/Sensory |
| HDPIW06 | SEQ ID NO: 818 | | Digestive, Immune/Hematopoietic, Neural/Sensory |
| HDPIW06 | SEQ ID NO: 819 | | Digestive, Immune/Hematopoietic, Neural/Sensory |
| HDPIW06 | SEQ ID NO: 820 | | Digestive, Immune/Hematopoietic, Neural/Sensory |
| HDPPA04 | SEQ ID NO: 821 | | Cardiovascular, Connective/Epithelial, |
| | | | Immune/Hematopoietic |
| HDPPA04 | SEQ ID NO: 822 | | Cardiovascular, Connective/Epithelial, |
| | | | Immune/Hematopoietic |
| HDPPA04 | SEQ ID NO: 823 | | Cardiovascular, Connective/Epithelial, |
| | | | Immune/Hematopoietic |
| HDPPN86 | SEQ ID NO: 824 | | Cancer |
| HDPPN86 | SEQ ID NO: 825 | | Cancer |
| HDTEK44 | SEQ ID NO: 826 | | Connective/Epithelial, Immune/Hematopoietic, |
| | | | Reproductive |
| HDTEK44 | SEQ ID NO: 827 | | Connective/Epithelial, Immune/Hematopoietic, |
| | | | Reproductive |
| HDTEK44 | SEQ ID NO: 828 | | Connective/Epithelial, Immune/Hematopoietic, |
| | | | Reproductive |
| HDTEK44 | SEQ ID NO: 829 | | Connective/Epithelial, Immune/Hematopoietic, |
| | | | Reproductive |
| HOHBL42 | SEQ ID NO: 830 | | Cancer |
| HOHBL42 | SEQ ID NO: 831 | | Cancer |
| HOHBL42 | SEQ ID NO: 832 | | Cancer |
| HOHBL42 | SEQ ID NO: 833 | | Cancer |
| HOHBP82 | SEQ ID NO: 834 | | Musculoskeletal |
| HOHBP82 | SEQ ID NO: 835 | | Musculoskeletal |
| HOHBP82 | SEQ ID NO: 836 | | Musculoskeletal |
| HOHBP82 | SEQ ID NO: 837 | | Musculoskeletal |
| HOHBY44 | SEQ ID NO: 838 | | Cancer |
| HOHBY44 | SEQ ID NO: 839 | | Cancer |
| HOHBY44 | SEQ ID NO: 840 | | Cancer |
| HWBAD01 | SEQ ID NO: 841 | | Immune/Hematopoietic |
| HWBAD01 | SEQ ID NO: 842 | | Immune/Hematopoietic |
| HWBAD01 | SEQ ID NO: 843 | | Immune/Hematopoietic |
| HOHCJ90 | SEQ ID NO: 844 | | Cancer |
| HOHCJ90 | SEQ ID NO: 845 | | Cancer |
| HWABE12 | SEQ ID NO: 846 | | Cancer |
| HWABE12 | SEQ ID NO: 847 | | Cancer |
| HWABE12 | SEQ ID NO: 848 | | Cancer |
| HWBAR14 | SEQ ID NO: 849 | | Cancer |
| HWBAR14 | SEQ ID NO: 850 | | Cancer |
| HWBAR14 | SEQ ID NO: 851 | | Cancer |
| HWBAR14 | SEQ ID NO: 852 | | Cancer |
| HWBAR88 | SEQ ID NO: 853 | | Cancer |
| HWBCH13 | SEQ ID NO: 854 | | Immune/Hematopoietic |
| HWBCH13 | SEQ ID NO: 855 | | Immune/Hematopoietic |
| HWBCH13 | SEQ ID NO: 856 | | Immune/Hematopoietic |
| HWBCH13 | SEQ ID NO: 857 | | Immune/Hematopoietic |
| HWBCM79 | SEQ ID NO: 858 | | Immune/Hematopoietic |
| HWBCV72 | SEQ ID NO: 859 | | Cancer |
| HWBCV72 | SEQ ID NO: 860 | | Cancer |
| HWBCV72 | SEQ ID NO: 861 | | Cancer |
| HWBCV72 | SEQ ID NO: 862 | | Cancer |
| HWBDM62 | SEQ ID NO: 863 | | Endocrine, Immune/Hematopoietic |
| HWBDM62 | SEQ ID NO: 864 | | Endocrine, Immune/Hematopoietic |
| HWBDM62 | SEQ ID NO: 865 | | Endocrine, Immune/Hematopoietic |
| HWBDM62 | SEQ ID NO: 866 | | Endocrine, Immune/Hematopoietic |
| HMTAL77 | SEQ ID NO: 867 | | Cancer |
| HMTAL77 | SEQ ID NO: 868 | | Cancer |
| HDPRH52 | SEQ ID NO: 869 | | Cancer |
| HDPRH52 | SEQ ID NO: 870 | | Cancer |
| HDPSB18 | SEQ ID NO: 871 | | Cancer |
| HDPSB18 | SEQ ID NO: 872 | | Cancer |
| HDPSB18 | SEQ ID NO: 873 | | Cancer |
| HDPSB18 | SEQ ID NO: 874 | | Cancer |
| HDPSH53 | SEQ ID NO: 875 | | Immune/Hematopoietic, Reproductive |
| HDPSH53 | SEQ ID NO: 876 | | Immune/Hematopoietic, Reproductive |
| HDPLO25 | SEQ ID NO: 877 | | Cancer |
| HDPLO25 | SEQ ID NO: 878 | | Cancer |
| HDPLO25 | SEQ ID NO: 879 | | Cancer |
| HDPRN70 | SEQ ID NO: 880 | | Immune/Hematopoietic |
| HDPRN70 | SEQ ID NO: 881 | | Immune/Hematopoietic |
| HDPTW24 | SEQ ID NO: 882 | | Immune/Hematopoietic |
| HDPTW65 | SEQ ID NO: 883 | | Excretory |
| HDPTW65 | SEQ ID NO: 884 | | Excretory |
| HDPTW65 | SEQ ID NO: 885 | | Excretory |
| HDPWN93 | SEQ ID NO: 886 | | Cancer |
| HDPWN93 | SEQ ID NO: 887 | | Cancer |
| HDPWN93 | SEQ ID NO: 888 | | Cancer |
| HDPXY01 | SEQ ID NO: 889 | | Cancer |
| HDPXY01 | SEQ ID NO: 890 | | Cancer |
| HDPXY01 | SEQ ID NO: 891 | | Cancer |
| HDPXY01 | SEQ ID NO: 892 | | Cancer |
| HWHPM16 | SEQ ID NO: 893 | | Cancer |
| HWHPM16 | SEQ ID NO: 894 | | Cancer |
| HLDQA07 | SEQ ID NO: 895 | | Digestive |
| HLDQA07 | SEQ ID NO: 896 | | Digestive |
| HDTFE17 | SEQ ID NO: 897 | | Cancer |
| HDTFE17 | SEQ ID NO: 898 | | Cancer |
| HDTFE17 | SEQ ID NO: 899 | | Cancer |
| HWDAD17 | SEQ ID NO: 900 | | Cancer |
| HWDAD17 | SEQ ID NO: 901 | | Cancer |
| HWEAC77 | SEQ ID NO: 902 | | Connective/Epithelial |
| HWEAC77 | SEQ ID NO: 903 | | Connective/Epithelial |
| HWBEM18 | SEQ ID NO: 904 | | Cancer |
| HWBEM18 | SEQ ID NO: 905 | | Cancer |
| HWBEM18 | SEQ ID NO: 906 | | Cancer |
| HWBFE57 | SEQ ID NO: 907 | | Cancer |
| HWBFE57 | SEQ ID NO: 908 | | Cancer |
| HWBFE57 | SEQ ID NO: 909 | | Cancer |
| HOHDF66 | SEQ ID NO: 910 | | Musculoskeletal |
| HOHDF66 | SEQ ID NO: 911 | | Musculoskeletal |
| HOHDF66 | SEQ ID NO: 912 | | Musculoskeletal |
| HOHDC86 | SEQ ID NO: 913 | | Musculoskeletal |
| HOHDC86 | SEQ ID NO: 914 | | Musculoskeletal |
| HOHDC86 | SEQ ID NO: 915 | | Musculoskeletal |
| HRADO01 | SEQ ID NO: 916 | | Excretory |
| HRADO01 | SEQ ID NO: 917 | | Excretory |
| HRADO01 | SEQ ID NO: 918 | | Excretory |
| HRAEE45 | SEQ ID NO: 919 | | Connective/Epithelial, Excretory, |
| | | | Immune/Hematopoietic |
| HRAEE45 | SEQ ID NO: 920 | | Connective/Epithelial, Excretory, |
| | | | Immune/Hematopoietic |
| HRAEE45 | SEQ ID NO: 921 | | Connective/Epithelial, Excretory, |
| | | | Immune/Hematopoietic |
| HRAEH37 | SEQ ID NO: 922 | | Cancer |
| HRAEH37 | SEQ ID NO: 923 | | Cancer |
| HRAEH37 | SEQ ID NO: 924 | | Cancer |
| HWDAH38 | SEQ ID NO: 925 | | Cancer |
| HWDAH38 | SEQ ID NO: 926 | | Cancer |
| HLWCP78 | SEQ ID NO: 927 | | Cancer |
| HLWCP78 | SEQ ID NO: 928 | | Cancer |
| HLWCP78 | SEQ ID NO: 929 | | Cancer |
| HLWCP78 | SEQ ID NO: 930 | | Cancer |
| HTJML75 | SEQ ID NO: 931 | | Cancer |
| HTJML75 | SEQ ID NO: 932 | | Cancer |
| HTJNX29 | SEQ ID NO: 933 | | Connective/Epithelial, Digestive, |
| | | | Immune/Hematopoietic |
| HTJNX29 | SEQ ID NO: 934 | | Connective/Epithelial, Digestive, |
| | | | Immune/Hematopoietic |
| HTJNX29 | SEQ ID NO: 935 | | Connective/Epithelial, Digestive, |
| | | | Immune/Hematopoietic |
| HHESQ62 | SEQ ID NO: 936 | | Immune/Hematopoietic |
| HHESQ62 | SEQ ID NO: 937 | | Immune/Hematopoietic |
| HHESQ62 | SEQ ID NO: 938 | | Immune/Hematopoietic |
| HHESQ62 | SEQ ID NO: 939 | | Immune/Hematopoietic |
| HHESQ62 | SEQ ID NO: 940 | | Immune/Hematopoietic |
| HDQGO29 | SEQ ID NO: 941 | | Immune/Hematopoietic |
| HDQGO29 | SEQ ID NO: 942 | | Immune/Hematopoietic |
| HDQGO29 | SEQ ID NO: 943 | | Immune/Hematopoietic |
| HDQGO29 | SEQ ID NO: 944 | | Immune/Hematopoietic |
| HDQHY04 | SEQ ID NO: 945 | | Cancer |
| HDQHY04 | SEQ ID NO: 946 | | Cancer |
| HDQHY04 | SEQ ID NO: 947 | | Cancer |
| HBXAB02 | SEQ ID NO: 948 | | Cancer |
| HBXAB02 | SEQ ID NO: 949 | | Cancer |
| HBXAB02 | SEQ ID NO: 950 | | Cancer |
| HCWAU23 | SEQ ID NO: 951 | | Immune/Hematopoietic |
| HCWAU23 | SEQ ID NO: 952 | | Immune/Hematopoietic |
| HCWAU23 | SEQ ID NO: 953 | | Immune/Hematopoietic |
| HBXAM53 | SEQ ID NO: 954 | | Cancer |
| HBXAM53 | SEQ ID NO: 955 | | Cancer |
| HBXAM53 | SEQ ID NO: 956 | | Cancer |
| HCWBP34 | SEQ ID NO: 957 | | Immune/Hematopoietic |
| HCWBP34 | SEQ ID NO: 958 | | Immune/Hematopoietic |
| HCWBP34 | SEQ ID NO: 959 | | Immune/Hematopoietic |
| HBXCT44 | SEQ ID NO: 960 | | Cancer |
| HBXCT44 | SEQ ID NO: 961 | | Cancer |
| HBXCT44 | SEQ ID NO: 962 | | Cancer |
| HBXCT44 | SEQ ID NO: 963 | | Cancer |
| HCWDY64 | SEQ ID NO: 964 | | Excretory, Immune/Hematopoietic |
| HCWDY64 | SEQ ID NO: 965 | | Excretory, Immune/Hematopoietic |
| HCWDY64 | SEQ ID NO: 966 | | Excretory, Immune/Hematopoietic |
| HCWEB58 | SEQ ID NO: 967 | | Cancer |
| HCWEB58 | SEQ ID NO: 968 | | Cancer |
| HBXED80 | SEQ ID NO: 969 | | Immune/Hematopoietic, Neural/Sensory |
| HBXED80 | SEQ ID NO: 970 | | Immune/Hematopoietic, Neural/Sensory |
| HBXED80 | SEQ ID NO: 971 | | Immune/Hematopoietic, Neural/Sensory |
| HBXED80 | SEQ ID NO: 972 | | Immune/Hematopoietic, Neural/Sensory |
| HCWFT79 | SEQ ID NO: 973 | | Immune/Hematopoietic |
| HCWFT79 | SEQ ID NO: 974 | | Immune/Hematopoietic |
| HCWFT79 | SEQ ID NO: 975 | | Immune/Hematopoietic |
| HCWFU77 | SEQ ID NO: 976 | | Cancer |
| HCWFU77 | SEQ ID NO: 977 | | Cancer |
| HCWFU77 | SEQ ID NO: 978 | | Cancer |
| HBXFZ38 | SEQ ID NO: 979 | | Cancer |
| HBXFZ38 | SEQ ID NO: 980 | | Cancer |
| HBXFZ38 | SEQ ID NO: 981 | | Cancer |
| HCUGC55 | SEQ ID NO: 982 | | Immune/Hematopoietic |
| HCUGC55 | SEQ ID NO: 983 | | Immune/Hematopoietic |
| HCUGC55 | SEQ ID NO: 984 | | Immune/Hematopoietic |
| HCWGU37 | SEQ ID NO: 985 | | Immune/Hematopoietic, Neural/Sensory, |
| | | | Reproductive |
| HCWGU37 | SEQ ID NO: 986 | | Immune/Hematopoietic, Neural/Sensory, |
| | | | Reproductive |
| HCWHV88 | SEQ ID NO: 987 | | Digestive, Immune/Hematopoietic, Reproductive |
| HCWHV88 | SEQ ID NO: 988 | | Digestive, Immune/Hematopoietic, Reproductive |
| HCWHX82 | SEQ ID NO: 989 | | Immune/Hematopoietic, Neural/Sensory |
| HCWHX82 | SEQ ID NO: 990 | | Immune/Hematopoietic, Neural/Sensory |
| HCWHX82 | SEQ ID NO: 991 | | Immune/Hematopoietic, Neural/Sensory |
| HCWFZ59 | SEQ ID NO: 992 | | Immune/Hematopoietic |
| HCWFZ59 | SEQ ID NO: 993 | | Immune/Hematopoietic |
| HCWFZ59 | SEQ ID NO: 994 | | Immune/Hematopoietic |
| HCWFZ59 | SEQ ID NO: 995 | | Immune/Hematopoietic |
| HBWCB95 | SEQ ID NO: 996 | | Neural/Sensory |
| HBWCB95 | SEQ ID NO: 997 | | Neural/Sensory |
| HBWCB95 | SEQ ID NO: 998 | | Neural/Sensory |
| HBWBR94 | SEQ ID NO: 999 | | Neural/Sensory |
| HBWBR94 | SEQ ID NO: 1000 | | Neural/Sensory |
| HBWBR94 | SEQ ID NO: 1001 | | Neural/Sensory |
| HBWCF75 | SEQ ID NO: 1002 | | Neural/Sensory |
| HBWCF75 | SEQ ID NO: 1003 | | Neural/Sensory |
| HBWCF75 | SEQ ID NO: 1004 | | Neural/Sensory |
| HBWCM83 | SEQ ID NO: 1005 | | Digestive, Immune/Hematopoietic, Neural/Sensory |
| HBWCM83 | SEQ ID NO: 1006 | | Digestive, Immune/Hematopoietic, Neural/Sensory |
| HBWCM83 | SEQ ID NO: 1007 | | Digestive, Immune/Hematopoietic, Neural/Sensory |
| HBWCM83 | SEQ ID NO: 1008 | | Digestive, Immune/Hematopoietic, Neural/Sensory |
| HRSMQ86 | SEQ ID NO: 1009 | | Cancer |
| HRSMQ86 | SEQ ID NO: 1010 | | Cancer |
| HFCAA91 | SEQ ID NO: 1011 | | Neural/Sensory |
| HFCAA91 | SEQ ID NO: 1012 | | Neural/Sensory |
| HFCAA91 | SEQ ID NO: 1013 | | Neural/Sensory |
| HFCAL39 | SEQ ID NO: 1014 | | Cancer |
| HFCAL39 | SEQ ID NO: 1015 | | Cancer |
| HFCAL39 | SEQ ID NO: 1016 | | Cancer |
| HCEBN44 | SEQ ID NO: 1017 | | Neural/Sensory |
| HCEBN44 | SEQ ID NO: 1018 | | Neural/Sensory |
| HHFCP32 | SEQ ID NO: 1019 | | Cancer |
| HGBAJ60 | SEQ ID NO: 1020 | | Cancer |
| HGBAJ60 | SEQ ID NO: 1021 | | Cancer |
| HHFCW75 | SEQ ID NO: 1022 | | Cardiovascular |
| HHFCW75 | SEQ ID NO: 1023 | | Cardiovascular |
| HHFCW75 | SEQ ID NO: 1024 | | Cardiovascular |
| HHFCZ67 | SEQ ID NO: 1025 | | Cancer |
| HHFCZ67 | SEQ ID NO: 1026 | | Cancer |
| HHFCZ67 | SEQ ID NO: 1027 | | Cancer |
| HHFCZ67 | SEQ ID NO: 1028 | | Cancer |
| HJBAR01 | SEQ ID NO: 1029 | | Cancer |
| HJBAR01 | SEQ ID NO: 1030 | | Cancer |
| HETAR42 | SEQ ID NO: 1031 | | Cancer |
| HETAR42 | SEQ ID NO: 1032 | | Cancer |
| HETAR42 | SEQ ID NO: 1033 | | Cancer |
| HETAR42 | SEQ ID NO: 1034 | | Cancer |
| HETAM53 | SEQ ID NO: 1035 | | Cancer |
| HETAM53 | SEQ ID NO: 1036 | | Cancer |
| HETAM53 | SEQ ID NO: 1037 | | Cancer |
| HETAM53 | SEQ ID NO: 1038 | | Cancer |
| HETAM53 | SEQ ID NO: 1039 | | Cancer |
| HTPBG16 | SEQ ID NO: 1040 | | Digestive, Immune/Hematopoietic |
| HTPBG16 | SEQ ID NO: 1041 | | Digestive, Immune/Hematopoietic |
| HTPBG16 | SEQ ID NO: 1042 | | Digestive, Immune/Hematopoietic |
| HJAAJ58 | SEQ ID NO: 1043 | | Immune/Hematopoietic |
| HJAAJ58 | SEQ ID NO: 1044 | | Immune/Hematopoietic |
| HJAAJ58 | SEQ ID NO: 1045 | | Immune/Hematopoietic |
| HJAAJ58 | SEQ ID NO: 1046 | | Immune/Hematopoietic |
| HSBBT12 | SEQ ID NO: 1047 | | Cancer |
| HSBBT12 | SEQ ID NO: 1048 | | Cancer |
| HSBBT12 | SEQ ID NO: 1049 | | Cancer |
| HE8MH77 | SEQ ID NO: 1050 | | Immune/Hematopoietic, Mixed Fetal, |
| | | | Neural/Sensory |
| HE8MH77 | SEQ ID NO: 1051 | | Immune/Hematopoietic, Mixed Fetal, |
| | | | Neural/Sensory |
| HE8MH77 | SEQ ID NO: 1052 | | Immune/Hematopoietic, Mixed Fetal, |
| | | | Neural/Sensory |
| HTEDJ85 | SEQ ID NO: 1053 | | Cancer |
| HTEDJ85 | SEQ ID NO: 1054 | | Cancer |
| HTEDJ85 | SEQ ID NO: 1055 | | Cancer |
| HTEDJ85 | SEQ ID NO: 1056 | | Cancer |
| HOVAF78 | SEQ ID NO: 1057 | | Cancer |
| HOVAF78 | SEQ ID NO: 1058 | | Cancer |
| HOVAF78 | SEQ ID NO: 1059 | | Cancer |
| HOVAF78 | SEQ ID NO: 1060 | | Cancer |
| HOVAF78 | SEQ ID NO: 1061 | | Cancer |
| HHGDE24 | SEQ ID NO: 1062 | | Cancer |
| HHGDE24 | SEQ ID NO: 1063 | | Cancer |
| HHGDE24 | SEQ ID NO: 1064 | | Cancer |
| HOUFU35 | SEQ ID NO: 1065 | | Connective/Epithelial |
| HOUFU35 | SEQ ID NO: 1066 | | Connective/Epithelial |
| HOUFU35 | SEQ ID NO: 1067 | | Connective/Epithelial |
| HOUFU35 | SEQ ID NO: 1068 | | Connective/Epithelial |
| HSIGD79 | SEQ ID NO: 1069 | | Cancer |
| HSIGD79 | SEQ ID NO: 1070 | | Cancer |
| HCQCT05 | SEQ ID NO: 1071 | | Digestive, Endocrine, Reproductive |
| HCQCT05 | SEQ ID NO: 1072 | | Digestive, Endocrine, Reproductive |
| HMVDL30 | SEQ ID NO: 1073 | | Cancer |
| HMVDL30 | SEQ ID NO: 1074 | | Cancer |
| HMVDL30 | SEQ ID NO: 1075 | | Cancer |
| HMVDL30 | SEQ ID NO: 1076 | | Cancer |
| HTGGO35 | SEQ ID NO: 1077 | | Cancer |
| HTGGO35 | SEQ ID NO: 1078 | | Cancer |
| HTGGO35 | SEQ ID NO: 1079 | | Cancer |
| HCLBW50 | SEQ ID NO: 1080 | | Cancer |
| HCLBW50 | SEQ ID NO: 1081 | | Cancer |
| HCLBW50 | SEQ ID NO: 1082 | | Cancer |
| HCLBW50 | SEQ ID NO: 1083 | | Cancer |
| HWLEV32 | SEQ ID NO: 1084 | | Cancer |
| HWLEV32 | SEQ ID NO: 1085 | | Cancer |
| HWLEV32 | SEQ ID NO: 1086 | | Cancer |
| HWLEV32 | SEQ ID NO: 1087 | | Cancer |
| HWLFE89 | SEQ ID NO: 1088 | | Cancer |
| HWLFE89 | SEQ ID NO: 1089 | | Cancer |
| HWLFE89 | SEQ ID NO: 1090 | | Cancer |
| HE8PW38 | SEQ ID NO: 1091 | | Neural/Sensory |
| HE8PW38 | SEQ ID NO: 1092 | | Neural/Sensory |
| HE8PW38 | SEQ ID NO: 1093 | | Neural/Sensory |
| HE9RO27 | SEQ ID NO: 1094 | | Connective/Epithelial, Mixed Fetal |
| HE9RO27 | SEQ ID NO: 1095 | | Connective/Epithelial, Mixed Fetal |
| HE9RO27 | SEQ ID NO: 1096 | | Connective/Epithelial, Mixed Fetal |
| HCRPV17 | SEQ ID NO: 1097 | | Cancer |
| HCRPV17 | SEQ ID NO: 1098 | | Cancer |
| HCRPV17 | SEQ ID NO: 1099 | | Cancer |
| HCRPV17 | SEQ ID NO: 1100 | | Cancer |
| HHBGF77 | SEQ ID NO: 1101 | | Cancer |
| HHBGF77 | SEQ ID NO: 1102 | | Cancer |
| HLUDB47 | SEQ ID NO: 1103 | | Cancer |
| HLUDB47 | SEQ ID NO: 1104 | | Cancer |
| HLUDB47 | SEQ ID NO: 1105 | | Cancer |
| HHENZ16 | SEQ ID NO: 1106 | | Cancer |
| HHENZ16 | SEQ ID NO: 1107 | | Cancer |
| HHENZ16 | SEQ ID NO: 1108 | | Cancer |
| HSYBZ44 | SEQ ID NO: 1109 | | Cancer |
| HARNB17 | SEQ ID NO: 1110 | | Cancer |
| HARNB17 | SEQ ID NO: 1111 | | Cancer |
| HARNB17 | SEQ ID NO: 1112 | | Cancer |
| HARNB92 | SEQ ID NO: 1113 | | Cancer |
| HARNB92 | SEQ ID NO: 1114 | | Cancer |
| HARNB92 | SEQ ID NO: 1115 | | Cancer |
| HAMGV47 | SEQ ID NO: 1116 | | Cancer |
| HAMGV47 | SEQ ID NO: 1117 | | Cancer |
| HAMGV47 | SEQ ID NO: 1118 | | Cancer |
| HDTMK50 | SEQ ID NO: 1119 | | Cancer |
| HDTMK50 | SEQ ID NO: 1120 | | Cancer |
| HDTMK50 | SEQ ID NO: 1121 | | Cancer |
| HARBA09 | SEQ ID NO: 1122 | | Cancer |
| HARBA09 | SEQ ID NO: 1123 | | Cancer |
| HARBA09 | SEQ ID NO: 1124 | | Cancer |
| HARBA09 | SEQ ID NO: 1125 | | Cancer |
| HE8OK73 | SEQ ID NO: 1126 | | Mixed Fetal, Neural/Sensory |
| HE8OK73 | SEQ ID NO: 1127 | | Mixed Fetal, Neural/Sensory |
| HE8OK73 | SEQ ID NO: 1128 | | Mixed Fetal, Neural/Sensory |
| HSDJL42 | SEQ ID NO: 1129 | | Cancer |
| HSDJL42 | SEQ ID NO: 1130 | | Cancer |
| HSDJL42 | SEQ ID NO: 1131 | | Cancer |
| HCE2P86 | SEQ ID NO: 1132 | | Cancer |
| HCE2P86 | SEQ ID NO: 1133 | | Cancer |
| HCE2P86 | SEQ ID NO: 1134 | | Cancer |
| HNGNN78 | SEQ ID NO: 1135 | | Cancer |
| HNGNN78 | SEQ ID NO: 1136 | | Cancer |
| HNGNN78 | SEQ ID NO: 1137 | | Cancer |
| HTLHC59 | SEQ ID NO: 1138 | | Digestive, Reproductive |
| HTLHC59 | SEQ ID NO: 1139 | | Digestive, Reproductive |
| HTLJF15 | SEQ ID NO: 1140 | | Immune/Hematopoietic, Reproductive |
| HTLJF15 | SEQ ID NO: 1141 | | Immune/Hematopoietic, Reproductive |
| HTLJF15 | SEQ ID NO: 1142 | | Immune/Hematopoietic, Reproductive |
| HPJCC05 | SEQ ID NO: 1143 | | Reproductive |
| HPJCC05 | SEQ ID NO: 1144 | | Reproductive |
| HPJCC05 | SEQ ID NO: 1145 | | Reproductive |
| HDPVW11 | SEQ ID NO: 1146 | | Cancer |
| HDPVW11 | SEQ ID NO: 1147 | | Cancer |
| HDPWP69 | SEQ ID NO: 1148 | | Cancer |
| HDPWP69 | SEQ ID NO: 1149 | | Cancer |
| HDPWP69 | SEQ ID NO: 1150 | | Cancer |
| HWHHD11 | SEQ ID NO: 1151 | | Cancer |
| HWHHD11 | SEQ ID NO: 1152 | | Cancer |
| HWHHD11 | SEQ ID NO: 1153 | | Cancer |
| HBIMT93 | SEQ ID NO: 1154 | | Cancer |
| HBIMT93 | SEQ ID NO: 1155 | | Cancer |
| HBIMT93 | SEQ ID NO: 1156 | | Cancer |
| HHATA33 | SEQ ID NO: 1157 | | Cancer |
| HHATA33 | SEQ ID NO: 1158 | | Cancer |
| HNTDL21 | SEQ ID NO: 1159 | | Cancer |
| HNTDL21 | SEQ ID NO: 1160 | | Cancer |
| HNTNK95 | SEQ ID NO: 1161 | | Cancer |
| HNTNK95 | SEQ ID NO: 1162 | | Cancer |
| HNTNK95 | SEQ ID NO: 1163 | | Cancer |
| HWEAD64 | SEQ ID NO: 1164 | | Cancer |
| HWEAD64 | SEQ ID NO: 1165 | | Cancer |
| HWLHZ28 | SEQ ID NO: 1166 | | Cancer |
| HWLHZ28 | SEQ ID NO: 1167 | | Cancer |
| HWLHZ28 | SEQ ID NO: 1168 | | Cancer |
| HWLHZ28 | SEQ ID NO: 1169 | | Cancer |
| HWLJE21 | SEQ ID NO: 1170 | | Cancer |
| HWLJE21 | SEQ ID NO: 1171 | | Cancer |
| HWLJE21 | SEQ ID NO: 1172 | | Cancer |
| HPASD51 | SEQ ID NO: 1173 | | Digestive, Excretory, Reproductive |
| HPASD51 | SEQ ID NO: 1174 | | Digestive, Excretory, Reproductive |
| HSICQ15 | SEQ ID NO: 1175 | | Cancer |
| HSICQ15 | SEQ ID NO: 1176 | | Cancer |
| HFEBP27 | SEQ ID NO: 1177 | | Cancer |
| HFEBP27 | SEQ ID NO: 1178 | | Cancer |
| HFEBP27 | SEQ ID NO: 1179 | | Cancer |
| HTOIZ28 | SEQ ID NO: 1180 | | Cancer |
| HTOIZ28 | SEQ ID NO: 1181 | | Cancer |
| HTOIZ28 | SEQ ID NO: 1182 | | Cancer |
| HTOIZ28 | SEQ ID NO: 1183 | | Cancer |
| HCE4L28 | SEQ ID NO: 1184 | | Cancer |
| HCE4L28 | SEQ ID NO: 1185 | | Cancer |
| HCE4L28 | SEQ ID NO: 1186 | | Cancer |
| HCE4L28 | SEQ ID NO: 1187 | | Cancer |
| HFVGM16 | SEQ ID NO: 1188 | | Cancer |
| HFVGM16 | SEQ ID NO: 1189 | | Cancer |
| HPMGR66 | SEQ ID NO: 1190 | | Cancer |
| HPMGR66 | SEQ ID NO: 1191 | | Cancer |
| HLYDU43 | SEQ ID NO: 1192 | | Cancer |
| HLYDU43 | SEQ ID NO: 1193 | | Cancer |
| HPJCK10 | SEQ ID NO: 1194 | | Cancer |
| HPJCK10 | SEQ ID NO: 1195 | | Cancer |
| HT5EK75 | SEQ ID NO: 1196 | | Cancer |
| HT5EK75 | SEQ ID NO: 1197 | | Cancer |
| HT5EK75 | SEQ ID NO: 1198 | | Cancer |
| HWLEZ82 | SEQ ID NO: 1199 | | Cancer |
| HWLEZ82 | SEQ ID NO: 1200 | | Cancer |
| HWLEZ82 | SEQ ID NO: 1201 | | Cancer |
| HWLEZ82 | SEQ ID NO: 1202 | | Cancer |
| HDRMB11 | SEQ ID NO: 1203 | | Digestive |
| HDRMB11 | SEQ ID NO: 1204 | | Digestive |
| HDRMB11 | SEQ ID NO: 1205 | | Digestive |
| HCRNC80 | SEQ ID NO: 1206 | | Cancer |
| HCRNC80 | SEQ ID NO: 1207 | | Cancer |
| HCRNC80 | SEQ ID NO: 1208 | | Cancer |
| HCRNF14 | SEQ ID NO: 1209 | | Cancer |
| HCRNF14 | SEQ ID NO: 1210 | | Cancer |
| HCRNF14 | SEQ ID NO: 1211 | | Cancer |
| HE9PF45 | SEQ ID NO: 1212 | | Cancer |
| HE9PF45 | SEQ ID NO: 1213 | | Cancer |
| HE9PF45 | SEQ ID NO: 1214 | | Cancer |
| HISEN93 | SEQ ID NO: 1215 | | Cancer |
| HISEN93 | SEQ ID NO: 1216 | | Cancer |
| HISEN93 | SEQ ID NO: 1217 | | Cancer |
| HODEA51 | SEQ ID NO: 1218 | | Cancer |
| HODEA51 | SEQ ID NO: 1219 | | Cancer |
| HODEA51 | SEQ ID NO: 1220 | | Cancer |
| HODEA51 | SEQ ID NO: 1221 | | Cancer |
| HUSJN32 | SEQ ID NO: 1222 | | Cancer |
| HUSJN32 | SEQ ID NO: 1223 | | Cancer |
| HUSJN32 | SEQ ID NO: 1224 | | Cancer |
| HNGNW50 | SEQ ID NO: 1225 | | Immune/Hematopoietic, Mixed Fetal, Reproductive |
| HNGNW50 | SEQ ID NO: 1226 | | Immune/Hematopoietic, Mixed Fetal, Reproductive |
| HNGNW50 | SEQ ID NO: 1227 | | Immune/Hematopoietic, Mixed Fetal, Reproductive |
| HUVFB80 | SEQ ID NO: 1228 | | Cancer |
| HUVFB80 | SEQ ID NO: 1229 | | Cancer |
| HFIDQ92 | SEQ ID NO: 1230 | | Cancer |
| HFIDQ92 | SEQ ID NO: 1231 | | Cancer |
| HFIDQ92 | SEQ ID NO: 1232 | | Cancer |
| HTLJC07 | SEQ ID NO: 1233 | | Immune/Hematopoietic, Neural/Sensory, |
| | | | Reproductive |
| HTLJC07 | SEQ ID NO: 1234 | | Immune/Hematopoietic, Neural/Sensory, |
| | | | Reproductive |
| HTLJC07 | SEQ ID NO: 1235 | | Immune/Hematopoietic, Neural/Sensory, |
| | | | Reproductive |
| HMSOW51 | SEQ ID NO: 1236 | | Cancer |
| HMSOW51 | SEQ ID NO: 1237 | | Cancer |
| HPJEZ38 | SEQ ID NO: 1238 | | Cancer |
| HPJEZ38 | SEQ ID NO: 1239 | | Cancer |
| HPJEZ38 | SEQ ID NO: 1240 | | Cancer |
| HTAGN51 | SEQ ID NO: 1241 | | Immune/Hematopoietic, Neural/Sensory, |
| | | | Reproductive |
| HTAGN51 | SEQ ID NO: 1242 | | Immune/Hematopoietic, Neural/Sensory, |
| | | | Reproductive |
| HHFLH45 | SEQ ID NO: 1243 | | Cardiovascular, Reproductive |
| HHFLH45 | SEQ ID NO: 1244 | | Cardiovascular, Reproductive |
| HHFLH45 | SEQ ID NO: 1245 | | Cardiovascular, Reproductive |
| HFKLE15 | SEQ ID NO: 1246 | | Cancer |
| HFKLE15 | SEQ ID NO: 1247 | | Cancer |
| HNSAA27 | SEQ ID NO: 1248 | | Digestive |
| HNSAA27 | SEQ ID NO: 1249 | | Digestive |
| HUVFY29 | SEQ ID NO: 1250 | | Cancer |
| HUVFY29 | SEQ ID NO: 1251 | | Cancer |
| HAVUR23 | SEQ ID NO: 1252 | | Neural/Sensory |
| HAVUR23 | SEQ ID NO: 1253 | | Neural/Sensory |
| HTPIH83 | SEQ ID NO: 1254 | | Digestive, Reproductive |
| HTPIH83 | SEQ ID NO: 1255 | | Digestive, Reproductive |
| HTPIH83 | SEQ ID NO: 1256 | | Digestive, Reproductive |
| HUCNC61 | SEQ ID NO: 1257 | | Cancer |
| HIDAF73 | SEQ ID NO: 1258 | | Cancer |
| HIDAF73 | SEQ ID NO: 1259 | | Cancer |
| HIDAF73 | SEQ ID NO: 1260 | | Cancer |
| HOFMA42 | SEQ ID NO: 1261 | | Reproductive |
| HOFMA42 | SEQ ID NO: 1262 | | Reproductive |
| HKABW11 | SEQ ID NO: 1263 | | Cancer |
| HKABW11 | SEQ ID NO: 1264 | | Cancer |
| HWBAO29 | SEQ ID NO: 1265 | | Immune/Hematopoietic, Reproductive |
| HWBAO29 | SEQ ID NO: 1266 | | Immune/Hematopoietic, Reproductive |
| HWBAO29 | SEQ ID NO: 1267 | | Immune/Hematopoietic, Reproductive |
| HDPTM61 | SEQ ID NO: 1268 | | Digestive, Immune/Hematopoietic |
| HDPTM61 | SEQ ID NO: 1269 | | Digestive, Immune/Hematopoietic |
| HKAHL26 | SEQ ID NO: 1270 | | Cancer |
| HKAHL26 | SEQ ID NO: 1271 | | Cancer |
| HDQHC29 | SEQ ID NO: 1272 | | Cancer |
| HDQHQ91 | SEQ ID NO: 1273 | | Cancer |
| HDQHQ91 | SEQ ID NO: 1274 | | Cancer |
| HDQHQ91 | SEQ ID NO: 1275 | | Cancer |
| HDTLR06 | SEQ ID NO: 1276 | | Cancer |
| HDTLR06 | SEQ ID NO: 1277 | | Cancer |
| HNTDE84 | SEQ ID NO: 1278 | | Cancer |
| HNTDE84 | SEQ ID NO: 1279 | | Cancer |
| HWAFT87 | SEQ ID NO: 1280 | | Cardiovascular, Immune/Hematopoietic |
| HWAFT87 | SEQ ID NO: 1281 | | Cardiovascular, Immune/Hematopoietic |
| HWAFT87 | SEQ ID NO: 1282 | | Cardiovascular, Immune/Hematopoietic |
| HOGCE48 | SEQ ID NO: 1283 | | Cancer |
| HOGCE48 | SEQ ID NO: 1284 | | Cancer |
| HBINS58 | SEQ ID NO: 1285 | | Connective/Epithelial, Reproductive |
| HBINS58 | SEQ ID NO: 1286 | | Connective/Epithelial, Reproductive |
| HHAUQ28 | SEQ ID NO: 1287 | | Cancer |
| HHAUQ28 | SEQ ID NO: 1288 | | Cancer |
| HBIOH81 | SEQ ID NO: 1289 | | Cancer |
| HBIOH81 | SEQ ID NO: 1290 | | Cancer |
| HOGDP46 | SEQ ID NO: 1291 | | Cancer |
| HOGDP46 | SEQ ID NO: 1292 | | Cancer |
| HWHIH10 | SEQ ID NO: 1293 | | Cancer |
| HWHIH10 | SEQ ID NO: 1294 | | Cancer |
| HCWCT62 | SEQ ID NO: 1295 | | Immune/Hematopoietic |
| HCWCT62 | SEQ ID NO: 1296 | | Immune/Hematopoietic |
| HCWCT62 | SEQ ID NO: 1297 | | Immune/Hematopoietic |
| HBXCL50 | SEQ ID NO: 1298 | | Digestive, Excretory, Neural/Sensory |
| HBXCL50 | SEQ ID NO: 1299 | | Digestive, Excretory, Neural/Sensory |
| HACAA29 | SEQ ID NO: 1300 | | Cancer |
| HACAA29 | SEQ ID NO: 1301 | | Cancer |
| HAJAR23 | SEQ ID NO: 1302 | | Cancer |
| HAJAR23 | SEQ ID NO: 1303 | | Cancer |
| HAJAR23 | SEQ ID NO: 1304 | | Cancer |
| HDPQN12 | SEQ ID NO: 1305 | | Cancer |
| HDPQN12 | SEQ ID NO: 1306 | | Cancer |
| HDQFN31 | SEQ ID NO: 1307 | | Cancer |
| HDQFN31 | SEQ ID NO: 1308 | | Cancer |
| HDQIH54 | SEQ ID NO: 1309 | | Immune/Hematopoietic |
| HDQIH54 | SEQ ID NO: 1310 | | Immune/Hematopoietic |
| HETKL27 | SEQ ID NO: 1311 | | Cancer |
| HETKL27 | SEQ ID NO: 1312 | | Cancer |
| HETKL27 | SEQ ID NO: 1313 | | Cancer |
| HETKL27 | SEQ ID NO: 1314 | | Cancer |
| HFIHQ89 | SEQ ID NO: 1315 | | Cancer |
| HFIHQ89 | SEQ ID NO: 1316 | | Cancer |
| HFKHW50 | SEQ ID NO: 1317 | | Cancer |
| HFKHW50 | SEQ ID NO: 1318 | | Cancer |
| HFKHW50 | SEQ ID NO: 1319 | | Cancer |
| HMEJL08 | SEQ ID NO: 1320 | | Cancer |
| HMEJL08 | SEQ ID NO: 1321 | | Cancer |
| HMEJL08 | SEQ ID NO: 1322 | | Cancer |
| HMSCT72 | SEQ ID NO: 1323 | | Connective/Epithelial, Immune/Hematopoietic |
| HMSCT72 | SEQ ID NO: 1324 | | Connective/Epithelial, Immune/Hematopoietic |
| HMSCT72 | SEQ ID NO: 1325 | | Connective/Epithelial, Immune/Hematopoietic |
| HPJEX20 | SEQ ID NO: 1326 | | Immune/Hematopoietic, Reproductive |
| HPJEX20 | SEQ ID NO: 1327 | | Immune/Hematopoietic, Reproductive |
| HPJEX20 | SEQ ID NO: 1328 | | Immune/Hematopoietic, Reproductive |
| HPJEX20 | SEQ ID NO: 1329 | | Immune/Hematopoietic, Reproductive |
| HSLGM21 | SEQ ID NO: 1330 | | Cancer |
| HSLGM21 | SEQ ID NO: 1331 | | Cancer |
| HSLHI86 | SEQ ID NO: 1332 | | Cancer |
| HSLHI86 | SEQ ID NO: 1333 | | Cancer |
| HSLHI86 | SEQ ID NO: 1334 | | Cancer |
| HSLHI86 | SEQ ID NO: 1335 | | Cancer |
| HUCNP80 | SEQ ID NO: 1336 | | Cancer |
| HUCNP80 | SEQ ID NO: 1337 | | Cancer |
| HBINK72 | SEQ ID NO: 1338 | | Cancer |
| HBINK72 | SEQ ID NO: 1339 | | Cancer |
| HBINK72 | SEQ ID NO: 1340 | | Cancer |
| HIABC55 | SEQ ID NO: 1341 | | Cancer |
| HIABC55 | SEQ ID NO: 1342 | | Cancer |
| HIABC55 | SEQ ID NO: 1343 | | Cancer |
| HIABC55 | SEQ ID NO: 1344 | | Cancer |
| HGBAR55 | SEQ ID NO: 1345 | | Cancer |
| HGBAR55 | SEQ ID NO: 1346 | | Cancer |
| HGBAR55 | SEQ ID NO: 1347 | | Cancer |
| HE2FE45 | SEQ ID NO: 1348 | | Cancer |
| HE2FE45 | SEQ ID NO: 1349 | | Cancer |
| HE2FE45 | SEQ ID NO: 1350 | | Cancer |
| HMRAD54 | SEQ ID NO: 1351 | | Cancer |
| HMRAD54 | SEQ ID NO: 1352 | | Cancer |
| HMRAD54 | SEQ ID NO: 1353 | | Cancer |
| HCEFB80 | SEQ ID NO: 1354 | | Cancer |
| HCEFB80 | SEQ ID NO: 1355 | | Cancer |
| HFTBN23 | SEQ ID NO: 1356 | | Cancer |
| HFTBN23 | SEQ ID NO: 1357 | | Cancer |
| HFTBN23 | SEQ ID NO: 1358 | | Cancer |
| HFTBQ52 | SEQ ID NO: 1359 | | Cancer |
| HFTBQ52 | SEQ ID NO: 1360 | | Cancer |
| HMEEJ79 | SEQ ID NO: 1361 | | Cardiovascular, Neural/Sensory, Reproductive |
| HMEEJ79 | SEQ ID NO: 1362 | | Cardiovascular, Neural/Sensory, Reproductive |
| HROAJ39 | SEQ ID NO: 1363 | | Cancer |
| HROAJ39 | SEQ ID NO: 1364 | | Cancer |
| HROAJ39 | SEQ ID NO: 1365 | | Cancer |
| HFEBV76 | SEQ ID NO: 1366 | | Cancer |
| HFEBV76 | SEQ ID NO: 1367 | | Cancer |
| HTADC09 | SEQ ID NO: 1368 | | Cancer |
| HTADC09 | SEQ ID NO: 1369 | | Cancer |
| HFXBJ12 | SEQ ID NO: 1370 | | Neural/Sensory |
| HFXBJ12 | SEQ ID NO: 1371 | | Neural/Sensory |
| HFXBJ12 | SEQ ID NO: 1372 | | Neural/Sensory |
| HMHBN86 | SEQ ID NO: 1373 | | Cancer |
| HMHBN86 | SEQ ID NO: 1374 | | Cancer |
| HMHBN86 | SEQ ID NO: 1375 | | Cancer |
| HFKFL92 | SEQ ID NO: 1376 | | Cancer |
| HFKFL92 | SEQ ID NO: 1377 | | Cancer |
| HFKFL92 | SEQ ID NO: 1378 | | Cancer |
| HASAW52 | SEQ ID NO: 1379 | | Cancer |
| HTLDT76 | SEQ ID NO: 1380 | | Cardiovascular, Neural/Sensory, Reproductive |
| HTLDT76 | SEQ ID NO: 1381 | | Cardiovascular, Neural/Sensory, Reproductive |
| HTLDT76 | SEQ ID NO: 1382 | | Cardiovascular, Neural/Sensory, Reproductive |
| HTLEC34 | SEQ ID NO: 1383 | | Immune/Hematopoietic, Neural/Sensory, |
| | | | Reproductive |
| HTLEC34 | SEQ ID NO: 1384 | | Immune/Hematopoietic, Neural/Sensory, |
| | | | Reproductive |
| HNHFB60 | SEQ ID NO: 1385 | | Immune/Hematopoietic |
| HNHFB60 | SEQ ID NO: 1386 | | Immune/Hematopoietic |
| HNHFB60 | SEQ ID NO: 1387 | | Immune/Hematopoietic |
| H2CBK33 | SEQ ID NO: 1388 | | Cancer |
| H2CBK33 | SEQ ID NO: 1389 | | Cancer |
| H2CBK33 | SEQ ID NO: 1390 | | Cancer |
| HNGEY29 | SEQ ID NO: 1391 | | Cancer |
| HNGEY29 | SEQ ID NO: 1392 | | Cancer |
| HUSFE58 | SEQ ID NO: 1393 | | Cancer |
| HUSFE58 | SEQ ID NO: 1394 | | Cancer |
| HMSHS36 | SEQ ID NO: 1395 | | Immune/Hematopoietic |
| HMSHS36 | SEQ ID NO: 1396 | | Immune/Hematopoietic |
| HMSKC10 | SEQ ID NO: 1397 | | Immune/Hematopoietic |
| HMSKC10 | SEQ ID NO: 1398 | | Immune/Hematopoietic |
| HMSKC10 | SEQ ID NO: 1399 | | Immune/Hematopoietic |
| HSLGU75 | SEQ ID NO: 1400 | | Cancer |
| HSLGU75 | SEQ ID NO: 1401 | | Cancer |
| HSLGU75 | SEQ ID NO: 1402 | | Cancer |
| HDABU01 | SEQ ID NO: 1403 | | Cancer |
| HDABU01 | SEQ ID NO: 1404 | | Cancer |
| HDABU01 | SEQ ID NO: 1405 | | Cancer |
| HADGD17 | SEQ ID NO: 1406 | | Connective/Epithelial |
| HADGD17 | SEQ ID NO: 1407 | | Connective/Epithelial |
| HADGD17 | SEQ ID NO: 1408 | | Connective/Epithelial |
| HFIUE67 | SEQ ID NO: 1409 | | Cancer |
| HKGAM29 | SEQ ID NO: 1410 | | Cancer |
| HACBD86 | SEQ ID NO: 1411 | | Cancer |
| HACBD86 | SEQ ID NO: 1412 | | Cancer |
| HACBD86 | SEQ ID NO: 1413 | | Cancer |
| HEGAK23 | SEQ ID NO: 1414 | | Cancer |
| HEGAK23 | SEQ ID NO: 1415 | | Cancer |
| HEGAK23 | SEQ ID NO: 1416 | | Cancer |
| HEGAK23 | SEQ ID NO: 1417 | | Cancer |
| HCHAR90 | SEQ ID NO: 1418 | | Cancer |
| HCHAR90 | SEQ ID NO: 1419 | | Cancer |
| HCHAR90 | SEQ ID NO: 1420 | | Cancer |
| HLYCK27 | SEQ ID NO: 1421 | | Immune/Hematopoietic |
| HMVBP38 | SEQ ID NO: 1422 | | Cancer |
| HMVBP38 | SEQ ID NO: 1423 | | Cancer |
| HMVBP38 | SEQ ID NO: 1424 | | Cancer |
| HFACI31 | SEQ ID NO: 1425 | | Neural/Sensory |
| HFACI31 | SEQ ID NO: 1426 | | Neural/Sensory |
| HFACI31 | SEQ ID NO: 1427 | | Neural/Sensory |
| HBJKC04 | SEQ ID NO: 1428 | | Immune/Hematopoietic |
| HBJKC04 | SEQ ID NO: 1429 | | Immune/Hematopoietic |
| HBJKC04 | SEQ ID NO: 1430 | | Immune/Hematopoietic |
| HBJIT60 | SEQ ID NO: 1431 | | Immune/Hematopoietic |
| HBJIT60 | SEQ ID NO: 1432 | | Immune/Hematopoietic |
| HBJIT60 | SEQ ID NO: 1433 | | Immune/Hematopoietic |
| HPJBK03 | SEQ ID NO: 1434 | | Cancer |
| HPJBK03 | SEQ ID NO: 1435 | | Cancer |
| HPJCL22 | SEQ ID NO: 1436 | | Cancer |
| HPJCL22 | SEQ ID NO: 1437 | | Cancer |
| HPJCL22 | SEQ ID NO: 1438 | | Cancer |
| HTWJB71 | SEQ ID NO: 1439 | | Immune/Hematopoietic, Neural/Sensory |
| HNTOE45 | SEQ ID NO: 1440 | | Cancer |
| HNTOE45 | SEQ ID NO: 1441 | | Cancer |
| HNTRW30 | SEQ ID NO: 1442 | | Digestive, Immune/Hematopoietic, Mixed Fetal |
| HNTRW30 | SEQ ID NO: 1443 | | Digestive, Immune/Hematopoietic, Mixed Fetal |
| HCHPU32 | SEQ ID NO: 1444 | | Cancer |
| HCHPU32 | SEQ ID NO: 1445 | | Cancer |
| HCHPU32 | SEQ ID NO: 1446 | | Cancer |
| HGCNC48 | SEQ ID NO: 1447 | | Reproductive |
| HGCNC48 | SEQ ID NO: 1448 | | Reproductive |
| HLTHO84 | SEQ ID NO: 1449 | | Cancer |
| HSLIA81 | SEQ ID NO: 1450 | | Cancer |
| HSLIA81 | SEQ ID NO: 1451 | | Cancer |
| HSLIA81 | SEQ ID NO: 1452 | | Cancer |
| HSLIA81 | SEQ ID NO: 1453 | | Cancer |
| HBFMA07 | SEQ ID NO: 1454 | | Cancer |
| HBODE48 | SEQ ID NO: 1455 | | Digestive, Excretory, Immune/Hematopoietic |
| HBODE48 | SEQ ID NO: 1456 | | Digestive, Excretory, Immune/Hematopoietic |
| HBODE48 | SEQ ID NO: 1457 | | Digestive, Excretory, Immune/Hematopoietic |
| HBODE48 | SEQ ID NO: 1458 | | Digestive, Excretory, Immune/Hematopoietic |
| HCRME12 | SEQ ID NO: 1459 | | Cancer |
| HCRME12 | SEQ ID NO: 1460 | | Cancer |
| HBODQ16 | SEQ ID NO: 1461 | | Cancer |
| HBODQ16 | SEQ ID NO: 1462 | | Cancer |
| HASMB80 | SEQ ID NO: 1463 | | Cancer |
| HASMB80 | SEQ ID NO: 1464 | | Cancer |
| HBOEG11 | SEQ ID NO: 1465 | | Cancer |
| HBOEG11 | SEQ ID NO: 1466 | | Cancer |
| HCRNU76 | SEQ ID NO: 1467 | | Cancer |
| HCRNU76 | SEQ ID NO: 1468 | | Cancer |
| HAPSQ21 | SEQ ID NO: 1469 | | Reproductive, Respiratory |
| HAPSQ21 | SEQ ID NO: 1470 | | Reproductive, Respiratory |
| HAPSQ21 | SEQ ID NO: 1471 | | Reproductive, Respiratory |
| HWLNF33 | SEQ ID NO: 1472 | | Cancer |
| HWLNF33 | SEQ ID NO: 1473 | | Cancer |
| HE8QO53 | SEQ ID NO: 1474 | | Cancer |
| HE8QO53 | SEQ ID NO: 1475 | | Cancer |
| HE8QV67 | SEQ ID NO: 1476 | | Cancer |
| HE8QV67 | SEQ ID NO: 1477 | | Cancer |
| HE8TB68 | SEQ ID NO: 1478 | | Cancer |
| HE8TY90 | SEQ ID NO: 1479 | | Cancer |
| HE8TY90 | SEQ ID NO: 1480 | | Cancer |
| HE8TY90 | SEQ ID NO: 1481 | | Cancer |
| HE8TY90 | SEQ ID NO: 1482 | | Cancer |
| HETLM70 | SEQ ID NO: 1483 | | Digestive, Excretory, Reproductive |
| HETLM70 | SEQ ID NO: 1484 | | Digestive, Excretory, Reproductive |
| HETLM70 | SEQ ID NO: 1485 | | Digestive, Excretory, Reproductive |
| HISES66 | SEQ ID NO: 1486 | | Digestive, Reproductive |
| HISES66 | SEQ ID NO: 1487 | | Digestive, Reproductive |
| HISES66 | SEQ ID NO: 1488 | | Digestive, Reproductive |
| HTXKV29 | SEQ ID NO: 1489 | | Cancer |
| HTXKV29 | SEQ ID NO: 1490 | | Cancer |
| HTXKV29 | SEQ ID NO: 1491 | | Cancer |
| HTXLH48 | SEQ ID NO: 1492 | | Immune/Hematopoietic |
| HTXLH48 | SEQ ID NO: 1493 | | Immune/Hematopoietic |
| HTXLH48 | SEQ ID NO: 1494 | | Immune/Hematopoietic |
| HTEMD27 | SEQ ID NO: 1495 | | Cancer |
| HTEMD27 | SEQ ID NO: 1496 | | Cancer |
| HTEME02 | SEQ ID NO: 1497 | | Cancer |
| HTEME02 | SEQ ID NO: 1498 | | Cancer |
| HTEME02 | SEQ ID NO: 1499 | | Cancer |
| HNHLD23 | SEQ ID NO: 1500 | | Immune/Hematopoietic |
| HETLT82 | SEQ ID NO: 1501 | | Immune/Hematopoietic, Reproductive |
| HETLT82 | SEQ ID NO: 1502 | | Immune/Hematopoietic, Reproductive |
| HETLT82 | SEQ ID NO: 1503 | | Immune/Hematopoietic, Reproductive |
| HNGLH60 | SEQ ID NO: 1504 | | Immune/Hematopoietic, Musculoskeletal |
| HNGLH60 | SEQ ID NO: 1505 | | Immune/Hematopoietic, Musculoskeletal |
| HNGLH60 | SEQ ID NO: 1506 | | Immune/Hematopoietic, Musculoskeletal |
| HNHPG05 | SEQ ID NO: 1507 | | Immune/Hematopoietic |
| HNHPG05 | SEQ ID NO: 1508 | | Immune/Hematopoietic |
| HNHPG05 | SEQ ID NO: 1509 | | Immune/Hematopoietic |
| HUSIY89 | SEQ ID NO: 1510 | | Cardiovascular, Immune/Hematopoietic |
| HUSIY89 | SEQ ID NO: 1511 | | Cardiovascular, Immune/Hematopoietic |
| HUSJM25 | SEQ ID NO: 1512 | | Cancer |
| HUSJM25 | SEQ ID NO: 1513 | | Cancer |
| HTXNL31 | SEQ ID NO: 1514 | | Digestive, Immune/Hematopoietic, Reproductive |
| HTXNL31 | SEQ ID NO: 1515 | | Digestive, Immune/Hematopoietic, Reproductive |
| HBGNQ12 | SEQ ID NO: 1516 | | Cancer |
| HBGNQ12 | SEQ ID NO: 1517 | | Cancer |
| HNGNS74 | SEQ ID NO: 1518 | | Cancer |
| HNGNS74 | SEQ ID NO: 1519 | | Cancer |
| HNGOD80 | SEQ ID NO: 1520 | | Cancer |
| HNGOD80 | SEQ ID NO: 1521 | | Cancer |
| HODHK19 | SEQ ID NO: 1522 | | Reproductive |
| HODHK19 | SEQ ID NO: 1523 | | Reproductive |
| HODHK19 | SEQ ID NO: 1524 | | Reproductive |
| HTLHR26 | SEQ ID NO: 1525 | | Immune/Hematopoietic, Reproductive |
| HTLHR26 | SEQ ID NO: 1526 | | Immune/Hematopoietic, Reproductive |
| HTLHR26 | SEQ ID NO: 1527 | | Immune/Hematopoietic, Reproductive |
| HUSZS75 | SEQ ID NO: 1528 | | Cancer |
| HUSZS75 | SEQ ID NO: 1529 | | Cancer |
| HLQDY81 | SEQ ID NO: 1530 | | Cardiovascular, Digestive, Musculoskeletal |
| HBGNU56 | SEQ ID NO: 1531 | | Cancer |
| HBGNU56 | SEQ ID NO: 1532 | | Cancer |
| HODGL52 | SEQ ID NO: 1533 | | Cancer |
| HODGL52 | SEQ ID NO: 1534 | | Cancer |
| HTXNV67 | SEQ ID NO: 1535 | | Cancer |
| HTXNV67 | SEQ ID NO: 1536 | | Cancer |
| HTXNV67 | SEQ ID NO: 1537 | | Cancer |
| HOCNE30 | SEQ ID NO: 1538 | | Digestive, Musculoskeletal, Neural/Sensory |
| HOCNE30 | SEQ ID NO: 1539 | | Digestive, Musculoskeletal, Neural/Sensory |
| HOCNE30 | SEQ ID NO: 1540 | | Digestive, Musculoskeletal, Neural/Sensory |
| HMSOC30 | SEQ ID NO: 1541 | | Cancer |
| HMSOC30 | SEQ ID NO: 1542 | | Cancer |
| HWMAF61 | SEQ ID NO: 1543 | | Digestive |
| HWMAF61 | SEQ ID NO: 1544 | | Digestive |
| HWMAF61 | SEQ ID NO: 1545 | | Digestive |
| HWMAF61 | SEQ ID NO: 1546 | | Digestive |
| HWMAF61 | SEQ ID NO: 1547 | | Digestive |
| HWMAH36 | SEQ ID NO: 1548 | | Immune/Hematopoietic |
| HWMAH36 | SEQ ID NO: 1549 | | Immune/Hematopoietic |
| HXOAC69 | SEQ ID NO: 1550 | | Cancer |
| HXOAC69 | SEQ ID NO: 1551 | | Cancer |
| HPJDA23 | SEQ ID NO: 1552 | | Mixed Fetal, Neural/Sensory, Reproductive |
| HPJDA23 | SEQ ID NO: 1553 | | Mixed Fetal, Neural/Sensory, Reproductive |
| HPJEE14 | SEQ ID NO: 1554 | | Reproductive |
| HPJEE14 | SEQ ID NO: 1555 | | Reproductive |
| HPJEG57 | SEQ ID NO: 1556 | | Reproductive |
| HPJEG57 | SEQ ID NO: 1557 | | Reproductive |
| HPJEG57 | SEQ ID NO: 1558 | | Reproductive |
| HPJEV11 | SEQ ID NO: 1559 | | Cancer |
| HTTKT43 | SEQ ID NO: 1560 | | Cancer |
| HTTKT43 | SEQ ID NO: 1561 | | Cancer |
| HTTKT43 | SEQ ID NO: 1562 | | Cancer |
| HHFKM76 | SEQ ID NO: 1563 | | Cancer |
| HHFKM76 | SEQ ID NO: 1564 | | Cancer |
| HHFKM76 | SEQ ID NO: 1565 | | Cancer |
| HHFML08 | SEQ ID NO: 1566 | | Cardiovascular, Immune/Hematopoietic, Mixed |
| | | | Fetal |
| HHFML08 | SEQ ID NO: 1567 | | Cardiovascular, Immune/Hematopoietic, Mixed |
| | | | Fetal |
| HHFML08 | SEQ ID NO: 1568 | | Cardiovascular, Immune/Hematopoietic, Mixed |
| | | | Fetal |
| HTPFX69 | SEQ ID NO: 1569 | | Cancer |
| HTPFX69 | SEQ ID NO: 1570 | | Cancer |
| HTPFX69 | SEQ ID NO: 1571 | | Cancer |
| HTPFX69 | SEQ ID NO: 1572 | | Cancer |
| HFKLX38 | SEQ ID NO: 1573 | | Excretory, Respiratory |
| HFKLX38 | SEQ ID NO: 1574 | | Excretory, Respiratory |
| HFKLX38 | SEQ ID NO: 1575 | | Excretory, Respiratory |
| HFKME15 | SEQ ID NO: 1576 | | Excretory |
| HFKME15 | SEQ ID NO: 1577 | | Excretory |
| HUVFH14 | SEQ ID NO: 1578 | | Cancer |
| HUVFH14 | SEQ ID NO: 1579 | | Cancer |
| HUVFH14 | SEQ ID NO: 1580 | | Cancer |
| HE2KK74 | SEQ ID NO: 1581 | | Cancer |
| HE2KK74 | SEQ ID NO: 1582 | | Cancer |
| HE2KK74 | SEQ ID NO: 1583 | | Cancer |
| HMALI42 | SEQ ID NO: 1584 | | Immune/Hematopoietic |
| HE2LW65 | SEQ ID NO: 1585 | | Cancer |
| HE2LW65 | SEQ ID NO: 1586 | | Cancer |
| HE2LW65 | SEQ ID NO: 1587 | | Cancer |
| HTFOS57 | SEQ ID NO: 1588 | | Cancer |
| HTFOS57 | SEQ ID NO: 1589 | | Cancer |
| HTFOS57 | SEQ ID NO: 1590 | | Cancer |
| HUVHI35 | SEQ ID NO: 1591 | | Cancer |
| HUVHI35 | SEQ ID NO: 1592 | | Cancer |
| HUVHI35 | SEQ ID NO: 1593 | | Cancer |
| HUVHI35 | SEQ ID NO: 1594 | | Cancer |
| HTPHS66 | SEQ ID NO: 1595 | | Cancer |
| HTPHS66 | SEQ ID NO: 1596 | | Cancer |
| HTPHS66 | SEQ ID NO: 1597 | | Cancer |
| HHFOJ29 | SEQ ID NO: 1598 | | Cancer |
| HHFOJ29 | SEQ ID NO: 1599 | | Cancer |
| HHFOJ29 | SEQ ID NO: 1600 | | Cancer |
| HMAMI15 | SEQ ID NO: 1601 | | Cancer |
| HTXQM57 | SEQ ID NO: 1602 | | Immune/Hematopoietic, Mixed Fetal |
| HE2RO22 | SEQ ID NO: 1603 | | Mixed Fetal |
| HE2RO22 | SEQ ID NO: 1604 | | Mixed Fetal |
| HE2SI26 | SEQ ID NO: 1605 | | Cancer |
| HTXRE15 | SEQ ID NO: 1606 | | Cancer |
| HTXRE15 | SEQ ID NO: 1607 | | Cancer |
| HUCPD31 | SEQ ID NO: 1608 | | Cancer |
| HUCPD31 | SEQ ID NO: 1609 | | Cancer |
| HFPHA80 | SEQ ID NO: 1610 | | Neural/Sensory |
| HFPHA80 | SEQ ID NO: 1611 | | Neural/Sensory |
| HFPHA80 | SEQ ID NO: 1612 | | Neural/Sensory |
| HFPHA80 | SEQ ID NO: 1613 | | Neural/Sensory |
| HFPHB92 | SEQ ID NO: 1614 | | Excretory, Neural/Sensory |
| HFPHS77 | SEQ ID NO: 1615 | | Cancer |
| HFPHS77 | SEQ ID NO: 1616 | | Cancer |
| HFPHS77 | SEQ ID NO: 1617 | | Cancer |
| HIPAJ43 | SEQ ID NO: 1618 | | Cancer |
| HIPAJ43 | SEQ ID NO: 1619 | | Cancer |
| HDDMW90 | SEQ ID NO: 1620 | | Cancer |
| HDDMW90 | SEQ ID NO: 1621 | | Cancer |
| HBCPB32 | SEQ ID NO: 1622 | | Neural/Sensory, Reproductive |
| HFVKC95 | SEQ ID NO: 1623 | | Cancer |
| HFVKC95 | SEQ ID NO: 1624 | | Cancer |
| HFVKC95 | SEQ ID NO: 1625 | | Cancer |
| HCOMM91 | SEQ ID NO: 1626 | | Cancer |
| HCOMM91 | SEQ ID NO: 1627 | | Cancer |
| HVVAM64 | SEQ ID NO: 1628 | | Cancer |
| HVVAM64 | SEQ ID NO: 1629 | | Cancer |
| HVVAM64 | SEQ ID NO: 1630 | | Cancer |
| HNBUC50 | SEQ ID NO: 1631 | | Cancer |
| HNBUC50 | SEQ ID NO: 1632 | | Cancer |
| HNBUC50 | SEQ ID NO: 1633 | | Cancer |
| HNBUC50 | SEQ ID NO: 1634 | | Cancer |
| HUUDF48 | SEQ ID NO: 1635 | | Immune/Hematopoietic |
| HUUDF48 | SEQ ID NO: 1636 | | Immune/Hematopoietic |
| HBCQL32 | SEQ ID NO: 1637 | | Cancer |
| HBCQL32 | SEQ ID NO: 1638 | | Cancer |
| HCBND16 | SEQ ID NO: 1639 | | Cancer |
| HCBND16 | SEQ ID NO: 1640 | | Cancer |
| HNNBM45 | SEQ ID NO: 1641 | | Immune/Hematopoietic, Reproductive |
| HNNBM45 | SEQ ID NO: 1642 | | Immune/Hematopoietic, Reproductive |
| HWMGN33 | SEQ ID NO: 1643 | | Digestive |
| HWMGN33 | SEQ ID NO: 1644 | | Digestive |
| HWMLN52 | SEQ ID NO: 1645 | | Digestive, Immune/Hematopoietic |
| HWMLN52 | SEQ ID NO: 1646 | | Digestive, Immune/Hematopoietic |
| HWMLN52 | SEQ ID NO: 1647 | | Digestive, Immune/Hematopoietic |
| HVARW53 | SEQ ID NO: 1648 | | Digestive |
| HVARW53 | SEQ ID NO: 1649 | | Digestive |
| HAHFU44 | SEQ ID NO: 1650 | | Cardiovascular, Digestive, Musculoskeletal |
| HAHFU44 | SEQ ID NO: 1651 | | Cardiovascular, Digestive, Musculoskeletal |
| HAHFU44 | SEQ ID NO: 1652 | | Cardiovascular, Digestive, Musculoskeletal |
| HCOOS80 | SEQ ID NO: 1653 | | Cancer |
| HCOOS80 | SEQ ID NO: 1654 | | Cancer |
| HCOOS80 | SEQ ID NO: 1655 | | Cancer |
| HNKCO80 | SEQ ID NO: 1656 | | Cancer |
| HNKCO80 | SEQ ID NO: 1657 | | Cancer |
| HLTIP27 | SEQ ID NO: 1658 | | Immune/Hematopoietic |
| HLTIP27 | SEQ ID NO: 1659 | | Immune/Hematopoietic |
| HLTIP94 | SEQ ID NO: 1660 | | Immune/Hematopoietic, Mixed Fetal, |
| | | | Neural/Sensory |
| HLTIP94 | SEQ ID NO: 1661 | | Immune/Hematopoietic, Mixed Fetal, |
| | | | Neural/Sensory |
| HLTIP94 | SEQ ID NO: 1662 | | Immune/Hematopoietic, Mixed Fetal, |
| | | | Neural/Sensory |
| HOCPM23 | SEQ ID NO: 1663 | | Reproductive |
| HOCPM23 | SEQ ID NO: 1664 | | Reproductive |
| HPDWP28 | SEQ ID NO: 1665 | | Reproductive |
| HPDWP28 | SEQ ID NO: 1666 | | Reproductive |
| HLCND09 | SEQ ID NO: 1667 | | Cancer |
| HLCND09 | SEQ ID NO: 1668 | | Cancer |
| HEEBI05 | SEQ ID NO: 1669 | | Digestive, Reproductive |
| HEEBB55 | SEQ ID NO: 1670 | | Cancer |
| HEEBB55 | SEQ ID NO: 1671 | | Cancer |
| HEEBB55 | SEQ ID NO: 1672 | | Cancer |
| HEGCL11 | SEQ ID NO: 1673 | | Cancer |
| HEGCL11 | SEQ ID NO: 1674 | | Cancer |
| HNTPB82 | SEQ ID NO: 1675 | | Cancer |
| HNTPB82 | SEQ ID NO: 1676 | | Cancer |
| HOFMM69 | SEQ ID NO: 1677 | | Reproductive |
| HOFMM69 | SEQ ID NO: 1678 | | Reproductive |
| HLDAB75 | SEQ ID NO: 1679 | | Cancer |
| HLDAB75 | SEQ ID NO: 1680 | | Cancer |
| HKACC80 | SEQ ID NO: 1681 | | Cancer |
| HKACC80 | SEQ ID NO: 1682 | | Cancer |
| HKACC80 | SEQ ID NO: 1683 | | Cancer |
| HKAEL28 | SEQ ID NO: 1684 | | Connective/Epithelial, Immune/Hematopoietic, |
| | | | Reproductive |
| HKAEL28 | SEQ ID NO: 1685 | | Connective/Epithelial, Immune/Hematopoietic, |
| | | | Reproductive |
| HDPGT25 | SEQ ID NO: 1686 | | Cancer |
| HDPGT25 | SEQ ID NO: 1687 | | Cancer |
| HLWBT09 | SEQ ID NO: 1688 | | Excretory, Reproductive |
| HLWBT09 | SEQ ID NO: 1689 | | Excretory, Reproductive |
| HHEDN80 | SEQ ID NO: 1690 | | Cancer |
| HHEDN80 | SEQ ID NO: 1691 | | Cancer |
| HHEDN80 | SEQ ID NO: 1692 | | Cancer |
| HDFQB14 | SEQ ID NO: 1693 | | Immune/Hematopoietic, Neural/Sensory, |
| | | | Reproductive |
| HWAAW33 | SEQ ID NO: 1694 | | Cardiovascular, Immune/Hematopoietic, |
| | | | Musculoskeletal |
| HWAAW33 | SEQ ID NO: 1695 | | Cardiovascular, Immune/Hematopoietic, |
| | | | Musculoskeletal |
| HWABF47 | SEQ ID NO: 1696 | | Cancer |
| HWABF47 | SEQ ID NO: 1697 | | Cancer |
| HWABI12 | SEQ ID NO: 1698 | | Immune/Hematopoietic |
| HWABI12 | SEQ ID NO: 1699 | | Immune/Hematopoietic |
| HWBBT49 | SEQ ID NO: 1700 | | Cancer |
| HWBBT49 | SEQ ID NO: 1701 | | Cancer |
| HWBBT49 | SEQ ID NO: 1702 | | Cancer |
| HAMGG89 | SEQ ID NO: 1703 | | Immune/Hematopoietic, Neural/Sensory, |
| | | | Reproductive |
| HAMGG89 | SEQ ID NO: 1704 | | Immune/Hematopoietic, Neural/Sensory, |
| | | | Reproductive |
| HAJBW16 | SEQ ID NO: 1705 | | Neural/Sensory |
| HAJBW16 | SEQ ID NO: 1706 | | Neural/Sensory |
| HNTAI35 | SEQ ID NO: 1707 | | Cancer |
| HNTAI35 | SEQ ID NO: 1708 | | Cancer |
| HNTAI35 | SEQ ID NO: 1709 | | Cancer |
| HNTAI35 | SEQ ID NO: 1710 | | Cancer |
| HNTAI35 | SEQ ID NO: 1711 | | Cancer |
| HNTBN41 | SEQ ID NO: 1712 | | Immune/Hematopoietic |
| HNTBN41 | SEQ ID NO: 1713 | | Immune/Hematopoietic |
| HNTBN41 | SEQ ID NO: 1714 | | Immune/Hematopoietic |
| HNTBN41 | SEQ ID NO: 1715 | | Immune/Hematopoietic |
| HDPRJ60 | SEQ ID NO: 1716 | | Cancer |
| HDPRJ60 | SEQ ID NO: 1717 | | Cancer |
| HDPRJ60 | SEQ ID NO: 1718 | | Cancer |
| HDPSB01 | SEQ ID NO: 1719 | | Cancer |
| HDPSB01 | SEQ ID NO: 1720 | | Cancer |
| HDPSB01 | SEQ ID NO: 1721 | | Cancer |
| HDPSB01 | SEQ ID NO: 1722 | | Cancer |
| HDPSB01 | SEQ ID NO: 1723 | | Cancer |
| HDPTC31 | SEQ ID NO: 1724 | | Immune/Hematopoietic |
| HDPTC31 | SEQ ID NO: 1725 | | Immune/Hematopoietic |
| HDPTC31 | SEQ ID NO: 1726 | | Immune/Hematopoietic |
| HDPXL05 | SEQ ID NO: 1727 | | Immune/Hematopoietic, Reproductive |
| HDPXL05 | SEQ ID NO: 1728 | | Immune/Hematopoietic, Reproductive |
| HDPXL05 | SEQ ID NO: 1729 | | Immune/Hematopoietic, Reproductive |
| HDPXY88 | SEQ ID NO: 1730 | | Cancer |
| HDPXY88 | SEQ ID NO: 1731 | | Cancer |
| HDPXY88 | SEQ ID NO: 1732 | | Cancer |
| HLDQZ72 | SEQ ID NO: 1733 | | Cancer |
| HLDQZ72 | SEQ ID NO: 1734 | | Cancer |
| HLDQZ72 | SEQ ID NO: 1735 | | Cancer |
| HWBEV57 | SEQ ID NO: 1736 | | Immune/Hematopoietic |
| HWBEV57 | SEQ ID NO: 1737 | | Immune/Hematopoietic |
| HWBEV57 | SEQ ID NO: 1738 | | Immune/Hematopoietic |
| HAMHH20 | SEQ ID NO: 1739 | | Cancer |
| HAMHH20 | SEQ ID NO: 1740 | | Cancer |
| HDLAY18 | SEQ ID NO: 1741 | | Cancer |
| HDLAY18 | SEQ ID NO: 1742 | | Cancer |
| HKAHN23 | SEQ ID NO: 1743 | | Connective/Epithelial, Digestive, Mixed Fetal |
| HKAHN23 | SEQ ID NO: 1744 | | Connective/Epithelial, Digestive, Mixed Fetal |
| HKAJW28 | SEQ ID NO: 1745 | | Cancer |
| HKAJW28 | SEQ ID NO: 1746 | | Cancer |
| HDQFU73 | SEQ ID NO: 1747 | | Digestive, Immune/Hematopoietic |
| HDQFU73 | SEQ ID NO: 1748 | | Digestive, Immune/Hematopoietic |
| HDQFU73 | SEQ ID NO: 1749 | | Digestive, Immune/Hematopoietic |
| HDTKS69 | SEQ ID NO: 1750 | | Cancer |
| HSYDT06 | SEQ ID NO: 1751 | | Cancer |
| HSYDT06 | SEQ ID NO: 1752 | | Cancer |
| HSYDT06 | SEQ ID NO: 1753 | | Cancer |
| HSYDT06 | SEQ ID NO: 1754 | | Cancer |
| HNTEF28 | SEQ ID NO: 1755 | | Cancer |
| HNTEF28 | SEQ ID NO: 1756 | | Cancer |
| HNTEF53 | SEQ ID NO: 1757 | | Cancer |
| HNTEF53 | SEQ ID NO: 1758 | | Cancer |
| HNTEF53 | SEQ ID NO: 1759 | | Cancer |
| HNTEF53 | SEQ ID NO: 1760 | | Cancer |
| HDQFN60 | SEQ ID NO: 1761 | | Cancer |
| HDQFN60 | SEQ ID NO: 1762 | | Cancer |
| HHEXM06 | SEQ ID NO: 1763 | | Immune/Hematopoietic |
| HHEXM06 | SEQ ID NO: 1764 | | Immune/Hematopoietic |
| HBINU36 | SEQ ID NO: 1765 | | Connective/Epithelial, Immune/Hematopoietic, |
| | | | Musculoskeletal |
| HBINU36 | SEQ ID NO: 1766 | | Connective/Epithelial, Immune/Hematopoietic, |
| | | | Musculoskeletal |
| HBINU36 | SEQ ID NO: 1767 | | Connective/Epithelial, Immune/Hematopoietic, |
| | | | Musculoskeletal |
| HUJCQ39 | SEQ ID NO: 1768 | | Cancer |
| HUJCQ39 | SEQ ID NO: 1769 | | Cancer |
| HUJCQ39 | SEQ ID NO: 1770 | | Cancer |
| HCCCG83 | SEQ ID NO: 1771 | | Cancer |
| HCCCG83 | SEQ ID NO: 1772 | | Cancer |
| HCCCG83 | SEQ ID NO: 1773 | | Cancer |
| HWHIM26 | SEQ ID NO: 1774 | | Connective/Epithelial, Immune/Hematopoietic |
| HWHIM26 | SEQ ID NO: 1775 | | Connective/Epithelial, Immune/Hematopoietic |
| HWHKC09 | SEQ ID NO: 1776 | | Cancer |
| HWHKC09 | SEQ ID NO: 1777 | | Cancer |
| HWHKC09 | SEQ ID NO: 1778 | | Cancer |
| HWHKC09 | SEQ ID NO: 1779 | | Cancer |
| HWHKR51 | SEQ ID NO: 1780 | | Cancer |
| HWHKR51 | SEQ ID NO: 1781 | | Cancer |
| HWHKR51 | SEQ ID NO: 1782 | | Cancer |
| HWHRL06 | SEQ ID NO: 1783 | | Cancer |
| HWHRL06 | SEQ ID NO: 1784 | | Cancer |
| HAZAD32 | SEQ ID NO: 1785 | | Cancer |
| HAZAD32 | SEQ ID NO: 1786 | | Cancer |
| HPAMY60 | SEQ ID NO: 1787 | | Excretory |
| HPAMY60 | SEQ ID NO: 1788 | | Excretory |
| HAOTS04 | SEQ ID NO: 1789 | | Reproductive |
| HAOTS04 | SEQ ID NO: 1790 | | Reproductive |
| HAZAP37 | SEQ ID NO: 1791 | | Reproductive |
| HKZAS29 | SEQ ID NO: 1792 | | Cancer |
| HKZAS29 | SEQ ID NO: 1793 | | Cancer |
| HOVJP29 | SEQ ID NO: 1794 | | Reproductive |
| HOVJP29 | SEQ ID NO: 1795 | | Reproductive |
| HWHSB53 | SEQ ID NO: 1796 | | Cancer |
| HWHSB53 | SEQ ID NO: 1797 | | Cancer |
| HKZBS01 | SEQ ID NO: 1798 | | Cancer |
| HKZBS01 | SEQ ID NO: 1799 | | Cancer |
| HWHSO13 | SEQ ID NO: 1800 | | Connective/Epithelial |
| HWHSO13 | SEQ ID NO: 1801 | | Connective/Epithelial |
| HKZCK47 | SEQ ID NO: 1802 | | Immune/Hematopoietic, Reproductive |
| HCUHQ40 | SEQ ID NO: 1803 | | Cancer |
| HCUHQ40 | SEQ ID NO: 1804 | | Cancer |
| HCUHQ40 | SEQ ID NO: 1805 | | Cancer |
| HPJCP79 | SEQ ID NO: 1806 | | Cancer |
| HPJCP79 | SEQ ID NO: 1807 | | Cancer |
| HPJCP79 | SEQ ID NO: 1808 | | Cancer |
| HPJCP79 | SEQ ID NO: 1809 | | Cancer |
| HFXDI56 | SEQ ID NO: 1810 | | Immune/Hematopoietic, Musculoskeletal, |
| | | | Neural/Sensory |
| HFXDI56 | SEQ ID NO: 1811 | | Immune/Hematopoietic, Musculoskeletal, |
| | | | Neural/Sensory |
| HFXDI56 | SEQ ID NO: 1812 | | Immune/Hematopoietic, Musculoskeletal, |
| | | | Neural/Sensory |
| HFXDI56 | SEQ ID NO: 1813 | | Immune/Hematopoietic, Musculoskeletal, |
| | | | Neural/Sensory |
| HRDEP41 | SEQ ID NO: 1814 | | Cancer |
| HRDEP41 | SEQ ID NO: 1815 | | Cancer |
| HTEGF16 | SEQ ID NO: 1816 | | Cancer |
| HTEGF16 | SEQ ID NO: 1817 | | Cancer |
| HTEGF16 | SEQ ID NO: 1818 | | Cancer |
| HSUMA53 | SEQ ID NO: 1819 | | Cancer |
| HSUMA53 | SEQ ID NO: 1820 | | Cancer |
| HSUMA53 | SEQ ID NO: 1821 | | Cancer |
| HSUMA53 | SEQ ID NO: 1822 | | Cancer |
| HISET33 | SEQ ID NO: 1823 | | Digestive |
| HISET33 | SEQ ID NO: 1824 | | Digestive |
| HTTIJ31 | SEQ ID NO: 1825 | | Reproductive |
| HTTIJ31 | SEQ ID NO: 1826 | | Reproductive |
| HTPFX16 | SEQ ID NO: 1827 | | Digestive, Reproductive, Respiratory |
| HTPFX16 | SEQ ID NO: 1828 | | Digestive, Reproductive, Respiratory |
| HTFMX90 | SEQ ID NO: 1829 | | Cancer |
| HTFMX90 | SEQ ID NO: 1830 | | Cancer |
| HTFMX90 | SEQ ID NO: 1831 | | Cancer |
| HE8FD93 | SEQ ID NO: 1832 | | Cancer |
| HE8FD93 | SEQ ID NO: 1833 | | Cancer |
| HE8FD93 | SEQ ID NO: 1834 | | Cancer |
| HE8FD93 | SEQ ID NO: 1835 | | Cancer |
| HKGBJ74 | SEQ ID NO: 1836 | | Cancer |
| HKGBJ74 | SEQ ID NO: 1837 | | Cancer |
| HKGBJ74 | SEQ ID NO: 1838 | | Cancer |
| HKGBJ74 | SEQ ID NO: 1839 | | Cancer |
| HEEAG84 | SEQ ID NO: 1840 | | Reproductive |
| HEEAG84 | SEQ ID NO: 1841 | | Reproductive |
| HEOQX60 | SEQ ID NO: 1842 | | Cancer |
| HEOQX60 | SEQ ID NO: 1843 | | Cancer |
| HNGGB09 | SEQ ID NO: 1844 | | Immune/Hematopoietic |
| HNGGB09 | SEQ ID NO: 1845 | | Immune/Hematopoietic |
| HKIYI48 | SEQ ID NO: 1846 | | Cancer |
| HKIYI48 | SEQ ID NO: 1847 | | Cancer |
| HKIYI48 | SEQ ID NO: 1848 | | Cancer |
| HKIYI48 | SEQ ID NO: 1849 | | Cancer |
| HSYAB05 | SEQ ID NO: 1850 | | Cancer |
| HSYAB05 | SEQ ID NO: 1851 | | Cancer |
| HARMJ38 | SEQ ID NO: 1852 | | Cancer |
| HARMJ38 | SEQ ID NO: 1853 | | Cancer |
| HARMJ38 | SEQ ID NO: 1854 | | Cancer |
| HARMJ38 | SEQ ID NO: 1855 | | Cancer |
| HDTJG33 | SEQ ID NO: 1856 | | Cancer |
| HWAGJ85 | SEQ ID NO: 1857 | | Cardiovascular, Immune/Hematopoietic |
| HWAGJ85 | SEQ ID NO: 1858 | | Cardiovascular, Immune/Hematopoietic |
| HE2OW03 | SEQ ID NO: 1859 | | Mixed Fetal |
| HE2OW03 | SEQ ID NO: 1860 | | Mixed Fetal |
| HBQAE92 | SEQ ID NO: 1861 | | Digestive, Neural/Sensory |
| HBQAE92 | SEQ ID NO: 1862 | | Digestive, Neural/Sensory |
| HBQAE92 | SEQ ID NO: 1863 | | Digestive, Neural/Sensory |
| HTODL92 | SEQ ID NO: 1864 | | Cancer |
| HTODL92 | SEQ ID NO: 1865 | | Cancer |
| HTODL92 | SEQ ID NO: 1866 | | Cancer |
| HLQBR41 | SEQ ID NO: 1867 | | Cancer |
| HLQBR41 | SEQ ID NO: 1868 | | Cancer |
| HDSAP92 | SEQ ID NO: 1869 | | Cancer |
| HDSAP92 | SEQ ID NO: 1870 | | Cancer |
| HTAEC92 | SEQ ID NO: 1871 | | Cancer |
| HTAEC92 | SEQ ID NO: 1872 | | Cancer |
| HSLCK11 | SEQ ID NO: 1873 | | Cancer |
| HSLCK11 | SEQ ID NO: 1874 | | Cancer |
| HSLCK11 | SEQ ID NO: 1875 | | Cancer |
| HFCDR13 | SEQ ID NO: 1876 | | Neural/Sensory |
| HSLDS06 | SEQ ID NO: 1877 | | Musculoskeletal |
| HSLEF58 | SEQ ID NO: 1878 | | Cardiovascular, Digestive, Musculoskeletal |
| HPCAO10 | SEQ ID NO: 1879 | | Cancer |
| HMEJL61 | SEQ ID NO: 1880 | | Cancer |
| HMEJL61 | SEQ ID NO: 1881 | | Cancer |
| HMEJL61 | SEQ ID NO: 1882 | | Cancer |
| HUSHH92 | SEQ ID NO: 1883 | | Cancer |
| HUSHH92 | SEQ ID NO: 1884 | | Cancer |
| HUSHH92 | SEQ ID NO: 1885 | | Cancer |
| HUSHH92 | SEQ ID NO: 1886 | | Cancer |
| HBZAI90 | SEQ ID NO: 1887 | | Immune/Hematopoietic, Reproductive |
| HBZAI90 | SEQ ID NO: 1888 | | Immune/Hematopoietic, Reproductive |
| HNGIQ57 | SEQ ID NO: 1889 | | Immune/Hematopoietic |
| HNGIQ57 | SEQ ID NO: 1890 | | Immune/Hematopoietic |
| HNGJF62 | SEQ ID NO: 1891 | | Immune/Hematopoietic |
| HNGJF62 | SEQ ID NO: 1892 | | Immune/Hematopoietic |
| HFXJY38 | SEQ ID NO: 1893 | | Neural/Sensory |
| HFXJY38 | SEQ ID NO: 1894 | | Neural/Sensory |
| HFXKR54 | SEQ ID NO: 1895 | | Endocrine, Immune/Hematopoietic, |
| | | | Neural/Sensory |
| HFXKR54 | SEQ ID NO: 1896 | | Endocrine, Immune/Hematopoietic, |
| | | | Neural/Sensory |
| HFXKR54 | SEQ ID NO: 1897 | | Endocrine, Immune/Hematopoietic, |
| | | | Neural/Sensory |
| HAPOB80 | SEQ ID NO: 1898 | | Immune/Hematopoietic, Musculoskeletal |
| HAPOB80 | SEQ ID NO: 1899 | | Immune/Hematopoietic, Musculoskeletal |
| HAPOB80 | SEQ ID NO: 1900 | | Immune/Hematopoietic, Musculoskeletal |
| HAPOB80 | SEQ ID NO: 1901 | | Immune/Hematopoietic, Musculoskeletal |
| HBJHJ80 | SEQ ID NO: 1902 | | Connective/Epithelial, Immune/Hematopoietic, |
| | | | Reproductive |
| HFADF37 | SEQ ID NO: 1903 | | Cancer |
| HFADF37 | SEQ ID NO: 1904 | | Cancer |
| HNTSS75 | SEQ ID NO: 1905 | | Cancer |
| HCQDE22 | SEQ ID NO: 1906 | | Digestive |
| HCQDE22 | SEQ ID NO: 1907 | | Digestive |
| HE8NQ42 | SEQ ID NO: 1908 | | Mixed Fetal |
| HE8NQ42 | SEQ ID NO: 1909 | | Mixed Fetal |
| HE8QD31 | SEQ ID NO: 1910 | | Digestive, Mixed Fetal, Neural/Sensory |
| HE8QD31 | SEQ ID NO: 1911 | | Digestive, Mixed Fetal, Neural/Sensory |
| HE9PR39 | SEQ ID NO: 1912 | | Digestive, Mixed Fetal, Musculoskeletal |
| HE9PR39 | SEQ ID NO: 1913 | | Digestive, Mixed Fetal, Musculoskeletal |
| HE9PR39 | SEQ ID NO: 1914 | | Digestive, Mixed Fetal, Musculoskeletal |
| HE9PR39 | SEQ ID NO: 1915 | | Digestive, Mixed Fetal, Musculoskeletal |
| HNHLA36 | SEQ ID NO: 1916 | | Immune/Hematopoietic, Reproductive |
| HNHLA36 | SEQ ID NO: 1917 | | Immune/Hematopoietic, Reproductive |
| HNHOD23 | SEQ ID NO: 1918 | | Cancer |
| HNHOD23 | SEQ ID NO: 1919 | | Cancer |
| HNHOD23 | SEQ ID NO: 1920 | | Cancer |
| HNGNI25 | SEQ ID NO: 1921 | | Immune/Hematopoietic |
| HNGNI25 | SEQ ID NO: 1922 | | Immune/Hematopoietic |
| HNGNI25 | SEQ ID NO: 1923 | | Immune/Hematopoietic |
| HNGNI25 | SEQ ID NO: 1924 | | Immune/Hematopoietic |
| HNGOQ44 | SEQ ID NO: 1925 | | Immune/Hematopoietic |
| HNGOQ44 | SEQ ID NO: 1926 | | Immune/Hematopoietic |
| HTLGE31 | SEQ ID NO: 1927 | | Immune/Hematopoietic, Reproductive |
| HODHE60 | SEQ ID NO: 1928 | | Reproductive |
| HODHE60 | SEQ ID NO: 1929 | | Reproductive |
| HTLIV19 | SEQ ID NO: 1930 | | Reproductive |
| HOSDW58 | SEQ ID NO: 1931 | | Cancer |
| HOSDW58 | SEQ ID NO: 1932 | | Cancer |
| HOSDW58 | SEQ ID NO: 1933 | | Cancer |
| HPJDM47 | SEQ ID NO: 1934 | | Reproductive |
| HPJDM47 | SEQ ID NO: 1935 | | Reproductive |
| HPJEC20 | SEQ ID NO: 1936 | | Cancer |
| HPJEC20 | SEQ ID NO: 1937 | | Cancer |
| HTTJK27 | SEQ ID NO: 1938 | | Reproductive |
| HTTJK27 | SEQ ID NO: 1939 | | Reproductive |
| HTFOE85 | SEQ ID NO: 1940 | | Immune/Hematopoietic |
| HTFOE85 | SEQ ID NO: 1941 | | Immune/Hematopoietic |
| HTFOE85 | SEQ ID NO: 1942 | | Immune/Hematopoietic |
| HIPBA31 | SEQ ID NO: 1943 | | Cancer |
| HIPBA31 | SEQ ID NO: 1944 | | Cancer |
| HFVJY02 | SEQ ID NO: 1945 | | Digestive, Mixed Fetal, Neural/Sensory |
| HFVJY02 | SEQ ID NO: 1946 | | Digestive, Mixed Fetal, Neural/Sensory |
| HFVJY02 | SEQ ID NO: 1947 | | Digestive, Mixed Fetal, Neural/Sensory |
| HFVJY02 | SEQ ID NO: 1948 | | Digestive, Mixed Fetal, Neural/Sensory |
| HFVJY02 | SEQ ID NO: 1949 | | Digestive, Mixed Fetal, Neural/Sensory |
| HOCOO19 | SEQ ID NO: 1950 | | Cancer |
| HOCOO19 | SEQ ID NO: 1951 | | Cancer |
| HOCOO19 | SEQ ID NO: 1952 | | Cancer |
| HWMKQ25 | SEQ ID NO: 1953 | | Digestive, Reproductive |
| HWMKQ25 | SEQ ID NO: 1954 | | Digestive, Reproductive |
| HWMKQ25 | SEQ ID NO: 1955 | | Digestive, Reproductive |
| HCOPG62 | SEQ ID NO: 1956 | | Cancer |
| HCOPG62 | SEQ ID NO: 1957 | | Cancer |
| HNKEL47 | SEQ ID NO: 1958 | | Cardiovascular, Connective/Epithelial, Digestive |
| HNKEL47 | SEQ ID NO: 1959 | | Cardiovascular, Connective/Epithelial, Digestive |
| HTPIY88 | SEQ ID NO: 1960 | | Digestive |
| HTPIY88 | SEQ ID NO: 1961 | | Digestive |
| HTPIY88 | SEQ ID NO: 1962 | | Digestive |
| HTPIY88 | SEQ ID NO: 1963 | | Digestive |
| HEGBS69 | SEQ ID NO: 1964 | | Neural/Sensory, Reproductive |
| HEGBS69 | SEQ ID NO: 1965 | | Neural/Sensory, Reproductive |
| HOFMU07 | SEQ ID NO: 1966 | | Reproductive |
| HOFMU07 | SEQ ID NO: 1967 | | Reproductive |
| HLWBM40 | SEQ ID NO: 1968 | | Neural/Sensory, Reproductive |
| HLWBM40 | SEQ ID NO: 1969 | | Neural/Sensory, Reproductive |
| HLWBM40 | SEQ ID NO: 1970 | | Neural/Sensory, Reproductive |
| HAMFT10 | SEQ ID NO: 1971 | | Cancer |
| HAMFT10 | SEQ ID NO: 1972 | | Cancer |
| HNTBP17 | SEQ ID NO: 1973 | | Cancer |
| HNTBP17 | SEQ ID NO: 1974 | | Cancer |
| HWDAO40 | SEQ ID NO: 1975 | | Cancer |
| HWDAO40 | SEQ ID NO: 1976 | | Cancer |
| HWDAO40 | SEQ ID NO: 1977 | | Cancer |
| HAJCL25 | SEQ ID NO: 1978 | | Immune/Hematopoietic |
| HAJCL25 | SEQ ID NO: 1979 | | Immune/Hematopoietic |
| HAJCL25 | SEQ ID NO: 1980 | | Immune/Hematopoietic |
| HNTEO95 | SEQ ID NO: 1981 | | Immune/Hematopoietic |
| HNTEO95 | SEQ ID NO: 1982 | | Immune/Hematopoietic |
| HNTEO95 | SEQ ID NO: 1983 | | Immune/Hematopoietic |
| HWAFG52 | SEQ ID NO: 1984 | | Cancer |
| HWAFG52 | SEQ ID NO: 1985 | | Cancer |
| HWAFG52 | SEQ ID NO: 1986 | | Cancer |
| HWAFG52 | SEQ ID NO: 1987 | | Cancer |
| HWAHE17 | SEQ ID NO: 1988 | | Digestive, Immune/Hematopoietic |
| HWAHE17 | SEQ ID NO: 1989 | | Digestive, Immune/Hematopoietic |
| HWAHE17 | SEQ ID NO: 1990 | | Digestive, Immune/Hematopoietic |
| HUJBK19 | SEQ ID NO: 1991 | | Cancer |
| HUJBK19 | SEQ ID NO: 1992 | | Cancer |
| HUJBK19 | SEQ ID NO: 1993 | | Cancer |
| HWHJD93 | SEQ ID NO: 1994 | | Cancer |
| HWHJD93 | SEQ ID NO: 1995 | | Cancer |
| HAOST94 | SEQ ID NO: 1996 | | Cancer |
| HAOST94 | SEQ ID NO: 1997 | | Cancer |
| HKZAH22 | SEQ ID NO: 1998 | | Reproductive |
| HKZAH22 | SEQ ID NO: 1999 | | Reproductive |
| HKZAH22 | SEQ ID NO: 2000 | | Reproductive |
| HKZAO35 | SEQ ID NO: 2001 | | Reproductive |
| HKZAO35 | SEQ ID NO: 2002 | | Reproductive |
| HWHSK19 | SEQ ID NO: 2003 | | Cancer |
| HWHSK19 | SEQ ID NO: 2004 | | Cancer |
| HWHSK19 | SEQ ID NO: 2005 | | Cancer |
| HMWFG79 | SEQ ID NO: 2006 | | Digestive, Immune/Hematopoietic, Reproductive |
| HMWFG79 | SEQ ID NO: 2007 | | Digestive, Immune/Hematopoietic, Reproductive |
| HMWFG79 | SEQ ID NO: 2008 | | Digestive, Immune/Hematopoietic, Reproductive |
| HMWFG79 | SEQ ID NO: 2009 | | Digestive, Immune/Hematopoietic, Reproductive |
| HMWFG79 | SEQ ID NO: 2010 | | Digestive, Immune/Hematopoietic, Reproductive |
| HMTAE85 | SEQ ID NO: 2011 | | Cancer |
| HMTBI36 | SEQ ID NO: 2012 | | Cancer |
| HSUME76 | SEQ ID NO: 2013 | | Cancer |
| HSUME76 | SEQ ID NO: 2014 | | Cancer |
| HTEAF65 | SEQ ID NO: 2015 | | Excretory, Reproductive |
| HTEAT31 | SEQ ID NO: 2016 | | Cancer |
| HAJAN23 | SEQ ID NO: 2017 | | Cancer |
| HAPRJ16 | SEQ ID NO: 2018 | | Cancer |
| HDTDT55 | SEQ ID NO: 2019 | | Cancer |
| HSKDA27 | SEQ ID NO: 2020 | | Cancer |
| HSKDA27 | SEQ ID NO: 2021 | | Cancer |
| HWLED11 | SEQ ID NO: 2022 | | Cancer |
| HADGD33 | SEQ ID NO: 2023 | | Connective/Epithelial, Neural/Sensory, |
| | | | Reproductive |
| HCEBF19 | SEQ ID NO: 2024 | | Cancer |
| HCEBF19 | SEQ ID NO: 2025 | | Cancer |
| HDPHH40 | SEQ ID NO: 2026 | | Cancer |
| HHEPM33 | SEQ ID NO: 2027 | | Cancer |
| HJBAF16 | SEQ ID NO: 2028 | | Cancer |
| HJBCU04 | SEQ ID NO: 2029 | | Cancer |
| HWABY10 | SEQ ID NO: 2030 | | Cancer |
| HWABY10 | SEQ ID NO: 2031 | | Cancer |
| HWABY10 | SEQ ID NO: 2032 | | Cancer |
| HWABY10 | SEQ ID NO: 2033 | | Cancer |
| HDPQN11 | SEQ ID NO: 2034 | | Cancer |
| HDPQN11 | SEQ ID NO: 2035 | | Cancer |
| HMSAW68 | SEQ ID NO: 2036 | | Cancer |
| HMSGP80 | SEQ ID NO: 2037 | | Cancer |
| HPJBZ76 | SEQ ID NO: 2038 | | Cancer |
| HSIGM62 | SEQ ID NO: 2039 | | Cancer |
| HSLHS22 | SEQ ID NO: 2040 | | Cancer |
| HTXOZ19 | SEQ ID NO: 2041 | | Cancer |
| HTXOZ19 | SEQ ID NO: 2042 | | Cancer |
| HAPQQ94 | SEQ ID NO: 2043 | | Immune/Hematopoietic, Reproductive |
| HAPQQ94 | SEQ ID NO: 2044 | | Immune/Hematopoietic, Reproductive |
| HAPSA79 | SEQ ID NO: 2045 | | Cancer |
| HAPSA79 | SEQ ID NO: 2046 | | Cancer |
| HAPSA79 | SEQ ID NO: 2047 | | Cancer |
| HDPAJ93 | SEQ ID NO: 2048 | | Cancer |
| HELGF34 | SEQ ID NO: 2049 | | Cancer |
| HETEQ88 | SEQ ID NO: 2050 | | Cancer |
| HMSAC18 | SEQ ID NO: 2051 | | Cancer |
| HMSAC18 | SEQ ID NO: 2052 | | Cancer |
| HPQSH59 | SEQ ID NO: 2053 | | Cancer |
| HSIFV30 | SEQ ID NO: 2054 | | Cancer |
| HSVCB08 | SEQ ID NO: 2055 | | Cancer |
| HT3SF53 | SEQ ID NO: 2056 | | Cancer |
| HARMS04 | SEQ ID NO: 2057 | | Connective/Epithelial, Digestive |
| HCDBP36 | SEQ ID NO: 2058 | | Musculoskeletal |
| HCEPE30 | SEQ ID NO: 2059 | | Excretory, Neural/Sensory |
| HE9RM63 | SEQ ID NO: 2060 | | Cancer |
| HKAJF71 | SEQ ID NO: 2061 | | Cancer |
| HNBAF49 | SEQ ID NO: 2062 | | Cancer |
| HSLDJ89 | SEQ ID NO: 2063 | | Cancer |
| HSXGI47 | SEQ ID NO: 2064 | | Cancer |
| HTEAJ18 | SEQ ID NO: 2065 | | Reproductive |
| HTTEV40 | SEQ ID NO: 2066 | | Cancer |
| HWBCB89 | SEQ ID NO: 2067 | | Cancer |
| HWHGZ51 | SEQ ID NO: 2068 | | Cancer |
| HADDH60 | SEQ ID NO: 2069 | | Connective/Epithelial, Immune/Hematopoietic, |
| | | | Neural/Sensory |
| HBXCL93 | SEQ ID NO: 2070 | | Neural/Sensory, Reproductive |
| HPTRH66 | SEQ ID NO: 2071 | | Cancer |
| HNFHD58 | SEQ ID NO: 2072 | | Cancer |
| HACAB58 | SEQ ID NO: 2073 | | Cancer |
| HCE3Z39 | SEQ ID NO: 2074 | | Cancer |
| HCFCU69 | SEQ ID NO: 2075 | | Cancer |
| HCE3Z39 | SEQ ID NO: 2076 | | Cancer |
| HCELE47 | SEQ ID NO: 2077 | | Cancer |
| HCWHP79 | SEQ ID NO: 2078 | | Immune/Hematopoietic |
| HDLAG89 | SEQ ID NO: 2079 | | Cancer |
| HDLAO28 | SEQ ID NO: 2080 | | Cancer |
| HDQGY41 | SEQ ID NO: 2081 | | Cancer |
| HE8FK78 | SEQ ID NO: 2082 | | Cancer |
| HE8FK78 | SEQ ID NO: 2083 | | Cancer |
| HETHR73 | SEQ ID NO: 2084 | | Cancer |
| HFIUW36 | SEQ ID NO: 2085 | | Cancer |
| HFKKS66 | SEQ ID NO: 2086 | | Cancer |
| HFPFK57 | SEQ ID NO: 2087 | | Neural/Sensory, Reproductive |
| HFVJP07 | SEQ ID NO: 2088 | | Digestive, Immune/Hematopoietic |
| HLQEM64 | SEQ ID NO: 2089 | | Cancer |
| HSSDG41 | SEQ ID NO: 2090 | | Cancer |
| HLQGP82 | SEQ ID NO: 2091 | | Connective/Epithelial, Digestive, Musculoskeletal |
| HMSMD07 | SEQ ID NO: 2092 | | Cancer |
| HNGIR58 | SEQ ID NO: 2093 | | Immune/Hematopoietic |
| HMAMI21 | SEQ ID NO: 2094 | | Cancer |
| HNHNB29 | SEQ ID NO: 2095 | | Immune/Hematopoietic |
| HNTEO78 | SEQ ID NO: 2096 | | Digestive, Immune/Hematopoietic |
| HJPAY76 | SEQ ID NO: 2097 | | Cancer |
| HOEEK12 | SEQ ID NO: 2098 | | Cancer |
| HOFNC14 | SEQ ID NO: 2099 | | Reproductive |
| HOSNU69 | SEQ ID NO: 2100 | | Cancer |
| HPJCL28 | SEQ ID NO: 2101 | | Neural/Sensory, Reproductive |
| HRACI26 | SEQ ID NO: 2102 | | Digestive, Excretory |
| HTLIT63 | SEQ ID NO: 2103 | | Reproductive |
| HTEAM34 | SEQ ID NO: 2104 | | Reproductive |
| HTEAM34 | SEQ ID NO: 2105 | | Reproductive |
| HUFGH53 | SEQ ID NO: 2106 | | Cancer |
| HUSBA88 | SEQ ID NO: 2107 | | Cancer |
| HELHN47 | SEQ ID NO: 2108 | | Cancer |
| HELHN47 | SEQ ID NO: 2109 | | Cancer |
| HELHN47 | SEQ ID NO: 2110 | | Cancer |
| HETAY39 | SEQ ID NO: 2111 | | Cancer |
| HFICR14 | SEQ ID NO: 2112 | | Cancer |
| HFICR14 | SEQ ID NO: 2113 | | Cancer |
| HFKET18 | SEQ ID NO: 2114 | | Cancer |
| HFXDK20 | SEQ ID NO: 2115 | | Immune/Hematopoietic, Neural/Sensory |
| HKMLX18 | SEQ ID NO: 2116 | | Cancer |
| HMSCM88 | SEQ ID NO: 2117 | | Immune/Hematopoietic |
| HMABG70 | SEQ ID NO: 2118 | | Connective/Epithelial, Immune/Hematopoietic, |
| | | | Musculoskeletal |
| HMADJ74 | SEQ ID NO: 2119 | | Connective/Epithelial, Immune/Hematopoietic, |
| | | | Musculoskeletal |
| HMADJ14 | SEQ ID NO: 2120 | | Connective/Epithelial, Immune/Hematopoietic, |
| | | | Musculoskeletal |
| HMADJ14 | SEQ ID NO: 2121 | | Connective/Epithelial, Immune/Hematopoietic, |
| | | | Musculoskeletal |
| HMADJ14 | SEQ ID NO: 2122 | | Connective/Epithelial, Immune/Hematopoietic, |
| | | | Musculoskeletal |
| HNEBY54 | SEQ ID NO: 2123 | | Cancer |
| HNEDD37 | SEQ ID NO: 2124 | | Cancer |
| HNGOU82 | SEQ ID NO: 2125 | | Immune/Hematopoietic, Reproductive |
| HNGOW62 | SEQ ID NO: 2126 | | Immune/Hematopoietic |
| HSICO66 | SEQ ID NO: 2127 | | Cancer |
| HSIDQ93 | SEQ ID NO: 2128 | | Cancer |
| HSLGM81 | SEQ ID NO: 2129 | | Cancer |
| HSYBM41 | SEQ ID NO: 2130 | | Cancer |
| HSODB85 | SEQ ID NO: 2131 | | Cancer |
| HSRFZ57 | SEQ ID NO: 2132 | | Excretory, Musculoskeletal |
| HSXAZ05 | SEQ ID NO: 2133 | | Neural/Sensory, Respiratory |
| HTPCW21 | SEQ ID NO: 2134 | | Digestive, Neural/Sensory |
| HTPCW21 | SEQ ID NO: 2135 | | Digestive, Neural/Sensory |
| HTXKF95 | SEQ ID NO: 2136 | | Cancer |
| HTXKF95 | SEQ ID NO: 2137 | | Cancer |
| HUFBC44 | SEQ ID NO: 2138 | | Digestive, Mixed Fetal, Neural/Sensory |
| HAAAI67 | SEQ ID NO: 2139 | | Cancer |
| HFKIA71 | SEQ ID NO: 2140 | | Cancer |
| HAMFP32 | SEQ ID NO: 2141 | | Cancer |
| HAPQU71 | SEQ ID NO: 2142 | | Cancer |
| HAPQU71 | SEQ ID NO: 2143 | | Cancer |
| HLHDL42 | SEQ ID NO: 2144 | | Cancer |
| HAVVG36 | SEQ ID NO: 2145 | | Cancer |
| HBGNP63 | SEQ ID NO: 2146 | | Reproductive |
| HBJNC59 | SEQ ID NO: 2147 | | Cancer |
| HAPQT56 | SEQ ID NO: 2148 | | Cancer |
| HCABW07 | SEQ ID NO: 2149 | | Cancer |
| HDPFB02 | SEQ ID NO: 2150 | | Cancer |
| HMWDB84 | SEQ ID NO: 2151 | | Cancer |
| HDPFB02 | SEQ ID NO: 2152 | | Cancer |
| HDPFY41 | SEQ ID NO: 2153 | | Cancer |
| HDPIE85 | SEQ ID NO: 2154 | | Cancer |
| HDPOE32 | SEQ ID NO: 2155 | | Cancer |
| HWABL61 | SEQ ID NO: 2156 | | Cancer |
| HWABW88 | SEQ ID NO: 2157 | | Cancer |
| HWDAQ83 | SEQ ID NO: 2158 | | Cancer |
| HWDAQ83 | SEQ ID NO: 2159 | | Cancer |
| HWLHZ79 | SEQ ID NO: 2160 | | Connective/Epithelial, Digestive, Reproductive |
| HTXJM94 | SEQ ID NO: 2161 | | Cancer |
| HDPQG01 | SEQ ID NO: 2162 | | Cancer |
| HJPAD80 | SEQ ID NO: 2163 | | Cancer |
| HDPQG01 | SEQ ID NO: 2164 | | Cancer |
| HFXLF67 | SEQ ID NO: 2165 | | Neural/Sensory |
| HE2IO57 | SEQ ID NO: 2166 | | Cancer |
| HKGDP17 | SEQ ID NO: 2167 | | Respiratory |
| HLQFB12 | SEQ ID NO: 2168 | | Digestive, Reproductive |
| HLQFT18 | SEQ ID NO: 2169 | | Digestive, Reproductive |
| HOFNX30 | SEQ ID NO: 2170 | | Reproductive |
| HSSDM23 | SEQ ID NO: 2171 | | Cancer |
| HSSDM23 | SEQ ID NO: 2172 | | Cancer |
| HSVBD67 | SEQ ID NO: 2173 | | Cancer |
| HSVBD67 | SEQ ID NO: 2174 | | Cancer |
| HTGAT51 | SEQ ID NO: 2175 | | Cardiovascular, Immune/Hematopoietic, |
| | | | Reproductive |
| HTLGV19 | SEQ ID NO: 2176 | | Excretory, Reproductive |
| HTPHH74 | SEQ ID NO: 2177 | | Cancer |
| HTFOB75 | SEQ ID NO: 2178 | | Cancer |
| HTPHH74 | SEQ ID NO: 2179 | | Cancer |
| HWHGK36 | SEQ ID NO: 2180 | | Cancer |
| HLWAD77 | SEQ ID NO: 2181 | | Cancer |
| HDTGF15 | SEQ ID NO: 2182 | | Cancer |
| HWMBB68 | SEQ ID NO: 2183 | | Cancer |
| HWMBB68 | SEQ ID NO: 2184 | | Cancer |
| HAGDA35 | SEQ ID NO: 2185 | | Cancer |
| HAGDA35 | SEQ ID NO: 2186 | | Cancer |
| HAGDA35 | SEQ ID NO: 2187 | | Cancer |
| HRODQ04 | SEQ ID NO: 2188 | | Cancer |
| HTOJV86 | SEQ ID NO: 2189 | | Cancer |
| HCEFZ82 | SEQ ID NO: 2190 | | Cancer |
| HNGFW58 | SEQ ID NO: 2191 | | Cancer |
| HHBGE77 | SEQ ID NO: 2192 | | Cancer |
| HADFW77 | SEQ ID NO: 2193 | | Cancer |
| HSIED48 | SEQ ID NO: 2194 | | Cancer |
| HCEFZ82 | SEQ ID NO: 2195 | | Cancer |
| HTTCT46 | SEQ ID NO: 2196 | | Cancer |
| HSDEE58 | SEQ ID NO: 2197 | | Cancer |
| HEBCV31 | SEQ ID NO: 2198 | | Cancer |
| HDPOL27 | SEQ ID NO: 2199 | | Cancer |
| HDPOL27 | SEQ ID NO: 2200 | | Cancer |
| HE6DI14 | SEQ ID NO: 2201 | | Cancer |
| HLYAN43 | SEQ ID NO: 2202 | | Cancer |
| HDPUM13 | SEQ ID NO: 2203 | | Cancer |
| HPLAT62 | SEQ ID NO: 2204 | | Cancer |
| HAPQT56 | SEQ ID NO: 2205 | | Cancer |
| HACBG19 | SEQ ID NO: 2206 | | Cancer |
| HACBG19 | SEQ ID NO: 2207 | | Cancer |
| HLYAV34 | SEQ ID NO: 2208 | | Cancer |
| HCNSM85 | SEQ ID NO: 2209 | | Cancer |
| HTOCG60 | SEQ ID NO: 2210 | | Cancer |
| HLYAV34 | SEQ ID NO: 2211 | | Cancer |
| HDPWX42 | SEQ ID NO: 2212 | | Cancer |
| HOFNF53 | SEQ ID NO: 2213 | | Reproductive |
| HOFNF53 | SEQ ID NO: 2214 | | Reproductive |
| HMSEO15 | SEQ ID NO: 2215 | | Cancer |
| HBXFT65 | SEQ ID NO: 2216 | | Cancer |
| HFCEQ37 | SEQ ID NO: 2217 | | Cancer |
| HWNFG66 | SEQ ID NO: 2218 | | Digestive |
| HOHCA60 | SEQ ID NO: 2219 | | Cancer |
| HOHCA60 | SEQ ID NO: 2220 | | Cancer |
| HOHCA60 | SEQ ID NO: 2221 | | Cancer |
| HOHCA60 | SEQ ID NO: 2222 | | Cancer |
| HOHCA60 | SEQ ID NO: 2223 | | Cancer |
| HLDRR08 | SEQ ID NO: 2224 | | Digestive |
| HSKNP59 | SEQ ID NO: 2225 | | Musculoskeletal |
| HSKNP59 | SEQ ID NO: 2226 | | Musculoskeletal |
| HAMHE82 | SEQ ID NO: 2227 | | Cancer |
| HBIOO68 | SEQ ID NO: 2228 | | Cancer |
| HCE3C63 | SEQ ID NO: 2229 | | Mixed Fetal, Neural/Sensory |
| HCNDV12 | SEQ ID NO: 2230 | | Digestive, Reproductive |
| HMWDW68 | SEQ ID NO: 2231 | | Cancer |
| HE2BC57 | SEQ ID NO: 2232 | | Cancer |
| HSDEE58 | SEQ ID NO: 2233 | | Cancer |
| HE9OW91 | SEQ ID NO: 2234 | | Cancer |
| HFCFI20 | SEQ ID NO: 2235 | | Cancer |
| HELEN05 | SEQ ID NO: 2236 | | Cancer |
| HISEL50 | SEQ ID NO: 2237 | | Cancer |
| HLHDL62 | SEQ ID NO: 2238 | | Cancer |
| HDFQB93 | SEQ ID NO: 2239 | | Cancer |
| HLHDQ86 | SEQ ID NO: 2240 | | Cancer |
| HLNAB24 | SEQ ID NO: 2241 | | Immune/Hematopoietic |
| HLYBQ90 | SEQ ID NO: 2242 | | Cancer |
| HLYBQ90 | SEQ ID NO: 2243 | | Cancer |
| HNHDP39 | SEQ ID NO: 2244 | | Endocrine, Immune/Hematopoietic, Reproductive |
| HNTAC64 | SEQ ID NO: 2245 | | Cancer |
| HNTMY29 | SEQ ID NO: 2246 | | Connective/Epithelial, Reproductive |
| HOFOC33 | SEQ ID NO: 2247 | | Reproductive |
| HOFOC33 | SEQ ID NO: 2248 | | Reproductive |
| HTWFK18 | SEQ ID NO: 2249 | | Connective/Epithelial, Immune/Hematopoietic |
| HAPNJ39 | SEQ ID NO: 2250 | | Cancer |
| HDQFU27 | SEQ ID NO: 2251 | | Cancer |
| HETJZ45 | SEQ ID NO: 2252 | | Cancer |
| HTEMX36 | SEQ ID NO: 2253 | | Cancer |
| HNTCH90 | SEQ ID NO: 2254 | | Cancer |
| HWLBP46 | SEQ ID NO: 2255 | | Cancer |
| HA5BM53 | SEQ ID NO: 2256 | | Cancer |
| HMCEH49 | SEQ ID NO: 2257 | | Cancer |
| HKBAL25 | SEQ ID NO: 2258 | | Digestive, Musculoskeletal |
| HE8EF43 | SEQ ID NO: 2259 | | Cancer |
| HE2RN91 | SEQ ID NO: 2260 | | Cancer |
| HTLIO20 | SEQ ID NO: 2261 | | Immune/Hematopoietic, Neural/Sensory |
| HBIMF63 | SEQ ID NO: 2262 | | Reproductive |
| HE9PM90 | SEQ ID NO: 2263 | | Cancer |
| HNTDX22 | SEQ ID NO: 2264 | | Reproductive |
| HHFCE59 | SEQ ID NO: 2265 | | Cancer |
| HCGAD44 | SEQ ID NO: 2266 | | Cancer |
| HSSJJ51 | SEQ ID NO: 2267 | | Cancer |

[0074] In preferred embodiments, the albumin fusion proteins of the invention are capable of a therapeutic activity and/or biological activity corresponding to the therapeutic activity and/or biologic activity of the Therapeutic protein corresponding to the Therapeutic protein portion of the albumin fusion protein listed in the corresponding row of Table 1. In further preferred embodiments, the therapeutically active protein portions of the albumin fusion proteins of the invention are fragments or variants of the reference sequence cited in the “Exemplary Identifier” column of Table 1, and are capable of the therapeutic activity and/or biologic activity of the corresponding Therapeutic protein.

[0075] Polypeptide and Polynucleotide Fragments and Variants

[0076] Fragments

[0077] The present invention is further directed to fragments of the Therapeutic proteins described in Table 1, albumin proteins, and/or albumin fusion proteins of the invention.

[0078] Even if deletion of one or more amino acids from the N-terminus of a protein results in modification or loss of one or more biological functions of the Therapeutic protein, albumin protein, and/or albumin fusion protein, other Therapeutic activities and/or functional activities (e.g., biological activities, ability to multimerize, ability to bind a ligand) may still be retained. For example, the ability of polypeptides with N-terminal deletions to induce and/or bind to antibodies which recognize the complete or mature forms of the polypeptides generally will be retained when less than the majority of the residues of the complete polypeptide are removed from the N-terminus. Whether a particular polypeptide lacking N-terminal residues of a complete polypeptide retains such immunologic activities can readily be determined by routine methods described herein and otherwise known in the art. It is not unlikely that a mutein with a large number of deleted N-terminal amino acid residues may retain some biological or immunogenic activities. In fact, peptides composed of as few as six amino acid residues may often evoke an immune response.

[0079] Accordingly, fragments of a Therapeutic protein corresponding to a Therapeutic protein portion of an albumin fusion protein of the invention, include the full length protein as well as polypeptides having one or more residues deleted from the amino terminus of the amino acid sequence of the reference polypeptide (i.e., a Therapeutic protein as disclosed in Table 1). In particular, N-terminal deletions may be described by the general formula m−q, where q is a whole integer representing the total number of amino acid residues in a reference polypeptide (e.g., a Therapeutic protein referred to in Table 1), and m is defined as any integer ranging from 2 to q−6. Polynucleotides encoding these polypeptides are also encompassed by the invention.

[0080] In addition, fragments of serum albumin polypeptides corresponding to an albumin protein portion of an albumin fusion protein of the invention, include the full length protein as well as polypeptides having one or more residues deleted from the amino terminus of the amino acid sequence of the reference polypeptide (i.e., serum albumin). In particular, N-terminal deletions may be described by the general formula m−585, where 585 is a whole integer representing the total number of amino acid residues in serum albumin (SEQ ID NO:18), and m is defined as any integer ranging from 2 to 579. Polynucleotides encoding these polypeptides are also encompassed by the invention.

[0081] Moreover, fragments of albumin fusion proteins of the invention, include the full length albumin fusion protein as well as polypeptides having one or more residues deleted from the amino terminus of the albumin fusion protein. In particular, N-terminal deletions may be described by the general formula m−q, where q is a whole integer representing the total number of amino acid residues in the albumin fusion protein, and m is defined as any integer ranging from 2 to q−6. Polynucleotides encoding these polypeptides are also encompassed by the invention.

[0082] Also as mentioned above, even if deletion of one or more amino acids from the N-terminus or C-terminus of a reference polypeptide (e.g., a Therapeutic protein and/or serum albumin protein) results in modification or loss of one or more biological functions of the protein, other functional activities (e.g., biological activities, ability to multimerize, ability to bind a ligand) and/or Therapeutic activities may still be retained. For example the ability of polypeptides with C-terminal deletions to induce and/or bind to antibodies which recognize the complete or mature forms of the polypeptide generally will be retained when less than the majority of the residues of the complete or mature polypeptide are removed from the C-terminus. Whether a particular polypeptide lacking the N-terminal and/or C-terminal residues of a reference polypeptide retains Therapeutic activity can readily be determined by routine methods described herein and/or otherwise known in the art.

[0083] The present invention further provides polypeptides having one or more residues deleted from the carboxy terminus of the amino acid sequence of a Therapeutic protein corresponding to a Therapeutic protein portion of an albumin fusion protein of the invention (e.g., a Therapeutic protein referred to in Table 1). In particular, C-terminal deletions may be described by the general formula 1−n, where n is any whole integer ranging from 6 to q−1, and where q is a whole integer representing the total number of amino acid residues in a reference polypeptide (e.g., a Therapeutic protein referred to in Table 1). Polynucleotides encoding these polypeptides are also encompassed by the invention.

[0084] In addition, the present invention provides polypeptides having one or more residues deleted from the carboxy terminus of the amino acid sequence of an albumin protein corresponding to an albumin protein portion of an albumin fusion protein of the invention (e.g., serum albumin). In particular, C-terminal deletions may be described by the general formula 1−n, where n is any whole integer ranging from 6 to 584, where 584 is the whole integer representing the total number of amino acid residues in serum albumin (SEQ ID NO:18) minus 1. Polynucleotides encoding these polypeptides are also encompassed by the invention.

[0085] Moreover, the present invention provides polypeptides having one or more residues deleted from the carboxy terminus of an albumin fusion protein of the invention. In particular, C-terminal deletions may be described by the general formula 1−n, where n is any whole integer ranging from 6 to q−1, and where q is a whole integer representing the total number of amino acid residues in an albumin fusion protein of the invention. Polynucleotides encoding these polypeptides are also encompassed by the invention.

[0086] In addition, any of the above described N— or C-terminal deletions can be combined to produce a N— and C-terminal deleted reference polypeptide. The invention also provides polypeptides having one or more amino acids deleted from both the amino and the carboxyl termini, which may be described generally as having residues m-n of a reference polypeptide (e.g., a Therapeutic protein referred to in Table 1, or serum albumin (e.g., SEQ ID NO:18), or an albumin fusion protein of the invention) where n and m are integers as described above. Polynucleotides encoding these polypeptides are also encompassed by the invention.

[0087] The present application is also directed to proteins containing polypeptides at least 80%, 85%, 90%, 95%, 96%, 97%, 98%, or 99%, identical to a reference polypeptide sequence (e.g., a Therapeutic protein, serum albumin protein or an albumin fusion protein of the invention) set forth herein, or fragments thereof. In preferred embodiments, the application is directed to proteins comprising polypeptides at least 80%, 85%, 90%, 95%, 96%, 97%, 98% or 99% identical to reference polypeptides having the amino acid sequence of N— and C-terminal deletions as described above. Polynucleotides encoding these polypeptides are also encompassed by the invention.

[0088] Preferred polypeptide fragments of the invention are fragments comprising, or alternatively, consisting of, an amino acid sequence that displays a Therapeutic activity and/or functional activity (e.g. biological activity) of the polypeptide sequence of the Therapeutic protein or serum albumin protein of which the amino acid sequence is a fragment. Other preferred polypeptide fragments are biologically active fragments. Biologically active fragments are those exhibiting activity similar, but not necessarily identical, to an activity of the polypeptide of the present invention. The biological activity of the fragments may include an improved desired activity, or a decreased undesirable activity.

[0089] Variants

[0090] “Variant” refers to a polynucleotide or nucleic acid differing from a reference nucleic acid or polypeptide, but retaining essential properties thereof. Generally, variants are overall closely similar, and, in many regions, identical to the reference nucleic acid or polypeptide.

[0091] As used herein, “variant”, refers to a Therapeutic protein portion of an albumin fusion protein of the invention, albumin portion of an albumin fusion protein of the invention, or albumin fusion protein differing in sequence from a Therapeutic protein (e.g. see “therapeutic” column of Table 1), albumin protein, and/or albumin fusion protein of the invention, respectively, but retaining at least one functional and/or therapeutic property thereof as described elsewhere herein or otherwise known in the art. Generally, variants are overall very similar, and, in many regions, identical to the amino acid sequence of the Therapeutic protein corresponding to a Therapeutic protein portion of an albumin fusion protein of the invention, albumin protein corresponding to an albumin protein portion of an albumin fusion protein of the invention, and/or albumin fusion protein of the invention. Nucleic acids encoding these variants are also encompassed by the invention.

[0092] The present invention is also directed to proteins which comprise, or alternatively consist of, an amino acid sequence which is at least 80%, 85%, 90%, 95%, 96%, 97%, 98%, 99% or 100%, identical to, for example, the amino acid sequence of a Therapeutic protein corresponding to a Therapeutic protein portion of an albumin fusion protein of the invention (e.g., an amino acid sequence disclosed in the “Exemplary Identifier” column of Table 1, or fragments or variants thereof), albumin proteins (e.g., SEQ ID NO:18 or fragments or variants thereof) corresponding to an albumin protein portion of an albumin fusion protein of the invention, and/or albumin fusion proteins of the invention. Fragments of these polypeptides are also provided (e.g., those fragments described herein). Further polypeptides encompassed by the invention are polypeptides encoded by polynucleotides which hybridize to the complement of a nucleic acid molecule encoding an amino acid sequence of the invention under stringent hybridization conditions (e.g., hybridization to filter bound DNA in 6×Sodium chloride/Sodium citrate (SSC) at about 45 degrees Celsius, followed by one or more washes in 0.2×SSC, 0.1% SDS at about 50-65 degrees Celsius), under highly stringent conditions (e.g., hybridization to filter bound DNA in 6×sodium chloride/Sodium citrate (SSC) at about 45 degrees Celsius, followed by one or more washes in 0.1×SSC, 0.2% SDS at about 68 degrees Celsius), or under other stringent hybridization conditions which are known to those of skill in the art (see, for example, Ausubel, F. M. et al., eds., 1989 Current protocol in Molecular Biology, Green publishing associates, Inc., and John Wiley & Sons Inc., New York, at pages 6.3.1-6.3.6 and 2.10.3). Polynucleotides encoding these polypeptides are also encompassed by the invention.

[0093] By a polypeptide having an amino acid sequence at least, for example, 95% “identical” to a query amino acid sequence of the present invention, it is intended that the amino acid sequence of the subject polypeptide is identical to the query sequence except that the subject polypeptide sequence may include up to five amino acid alterations per each 100 amino acids of the query amino acid sequence. In other words, to obtain a polypeptide having an amino acid sequence at least 95% identical to a query amino acid sequence, up to 5% of the amino acid residues in the subject sequence may be inserted, deleted, or substituted with another amino acid. These alterations of the reference sequence may occur at the amino- or carboxy-terminal positions of the reference amino acid sequence or anywhere between those terminal positions, interspersed either individually among residues in the reference sequence or in one or more contiguous groups within the reference sequence.

[0094] As a practical matter, whether any particular polypeptide is at least 80%, 85%, 90%, 95%, 96%, 97%, 98% or 99% identical to, for instance, the amino acid sequence of an albumin fusion protein of the invention or a fragment thereof (such as the Therapeutic protein portion of the albumin fusion protein or the albumin portion of the albumin fusion protein), can be determined conventionally using known computer programs. A preferred method for determining the best overall match between a query sequence (a sequence of the present invention) and a subject sequence, also referred to as a global sequence alignment, can be determined using the FASTDB computer program based on the algorithm of Brutlag et al. (Comp. App. Biosci.6:237-245 (1990)). In a sequence alignment the query and subject sequences are either both nucleotide sequences or both amino acid sequences. The result of said global sequence alignment is expressed as percent identity. Preferred parameters used in a FASTDB amino acid alignment are: Matrix=PAM 0, k-tuple=2, Mismatch Penalty=1, Joining Penalty=20, Randomization Group Length=0, Cutoff Score=1, Window Size=sequence length, Gap Penalty=5, Gap Size Penalty=0.05, Window Size=500 or the length of the subject amino acid sequence, whichever is shorter.

[0095] If the subject sequence is shorter than the query sequence due to N— or C-terminal deletions, not because of internal deletions, a manual correction must be made to the results. This is because the FASTDB program does not account for N— and C-terminal truncations of the subject sequence when calculating global percent identity. For subject sequences truncated at the N- and C-termini, relative to the query sequence, the percent identity is corrected by calculating the number of residues of the query sequence that are N— and C-terminal of the subject sequence, which are not matched/aligned with a corresponding subject residue, as a percent of the total bases of the query sequence. Whether a residue is matched/aligned is determined by results of the FASTDB sequence alignment. This percentage is then subtracted from the percent identity, calculated by the above FASTDB program using the specified parameters, to arrive at a final percent identity score. This final percent identity score is what is used for the purposes of the present invention. Only residues to the N— and C-termini of the subject sequence, which are not matched/aligned with the query sequence, are considered for the purposes of manually adjusting the percent identity score. That is, only query residue positions outside the farthest N— and C- terminal residues of the subject sequence.

[0096] For example, a 90 amino acid residue subject sequence is aligned with a 100 residue query sequence to determine The deletion occurs at the N-terminus of the subject sequence and therefore, the FASTDB alignment does not show a matching/alignment of the first 10 residues at the N-terminus. The 10 unpaired residues represent 10% of the sequence (number of residues at the N— and C-termini not matched/total number of residues in the query sequence) so 10% is subtracted from the percent identity score calculated by the FASTDB program. If the remaining 90 residues were perfectly matched the final percent identity would be 90%. In another example, a 90 residue subject sequence is compared with a 100 residue query sequence. This time the deletions are internal deletions so there are no residues at the N— or C-termini of the subject sequence which are not matched/aligned with the query. In this case the percent identity calculated by FASTDB is not manually corrected. Once again, only residue positions outside the N— and C-terminal ends of the subject sequence, as displayed in the FASTDB alignment, which are not matched/aligned with the query sequence are manually corrected for. No other manual corrections are to made for the purposes of the present invention.

[0097] The variant will usually have at least 75% (preferably at least about 80%, 90%, 95% or 99%) sequence identity with a length of normal HA or Therapeutic protein which is the same length as the variant. Homology or identity at the nucleotide or amino acid sequence level is determined by BLAST (Basic Local Alignment Search Tool) analysis using the algorithm employed by the programs blastp, blastn, blastx, tblastn and tblastx (Karlin et al., Proc. Natl. Acad. Sci. USA 87: 2264-2268 (1990) and Altschul, J. Mol. Evol. 36: 290-300 (1993), fully incorporated by reference) which are tailored for sequence similarity searching.

[0098] The approach used by the BLAST program is to first consider similar segments between a query sequence and a database sequence, then to evaluate the statistical significance of all matches that are identified and finally to summarize only those matches which satisfy a preselected threshold of significance. For a discussion of basic issues in similarity searching of sequence databases, see Altschul et al., (Nature Genetics 6: 119-129 (1994)) which is fully incorporated by reference. The search parameters for histogram, descriptions, alignments, expect (i.e., the statistical significance threshold for reporting matches against database sequences), cutoff, matrix and filter are at the default settings. The default scoring matrix used by blastp, blastx, tblastn, and tblastx is the BLOSUM62 matrix (Henikoff et al., Proc. Natl. Acad. Sci. USA 89: 10915-10919 (1992), fully incorporated by reference). For blastn, the scoring matrix is set by the ratios of M (i.e., the reward score for a pair of matching residues) to N (i.e., the penalty score for mismatching residues), wherein the default values for M and N are 5 and −4, respectively. Four blastn parameters may be adjusted as follows: Q=10 (gap creation penalty); R=10 (gap extension penalty); wink=1 (generates word hits at every wink^{th} position along the query); and gapw=16 (sets the window width within which gapped alignments are generated). The equivalent Blastp parameter settings were Q=9; R=2; wink=1; and gapw=32. A Bestfit comparison between sequences, available in the GCG package version 10.0, uses DNA parameters GAP=50 (gap creation penalty) and LEN=3 (gap extension penalty) and the equivalent settings in protein comparisons are GAP=8 and LEN=2.

[0099] The polynucleotide variants of the invention may contain alterations in the coding regions, non-coding regions, or both. Especially preferred are polynucleotide variants containing alterations which produce silent substitutions, additions, or deletions, but do not alter the properties or activities of the encoded polypeptide. Nucleotide variants produced by silent substitutions due to the degeneracy of the genetic code are preferred. Moreover, polypeptide variants in which less than 50, less than 40, less than 30, less than 20, less than 10, or 5-50, 5-25, 5-10, 1-5, or 1-2 amino acids are substituted, deleted, or added in any combination are also preferred. Polynucleotide variants can be produced for a variety of reasons, e.g., to optimize codon expression for a particular host (change codons in the human mRNA to those preferred by a bacterial host, such as, yeast or E. coli).

[0100] In a preferred embodiment, a polynucleotide encoding an albumin portion of an albumin fusion protein of the invention is optimized for expression in yeast or mammalian cells. In further preferred embodiment, a polynucleotide encoding a Therapeutic protein portion of an albumin fusion protein of the invention is optimized for expression in yeast or mammalian cells. In a still further preferred embodiment, a polynucleotide encoding an albumin fusion protein of the invention is optimized for expression in yeast or mammalian cells.

[0101] In an alternative embodiment, a codon optimized polynucleotide encoding a Therapeutic protein portion of an albumin fusion protein of the invention does not hybridize to the wild type polynucleotide encoding the Therapeutic protein under stringent hybridization conditions as described herein. In a further embodiment, a codon optimized polynucleotide encoding an albumin portion of an albumin fusion protein of the invention do not hybridize to the wild type polynucleotide encoding the albumin protein under stringent hybridization conditions as described herein. In another embodiment, a codon optimized polynucleotide encoding an albumin fusion protein of the invention do not hybridize to the wild type polynucleotide encoding the Therapeutic protein portion or the albumin protein portion under stringent hybridization conditions as described herein.

[0102] In an additional embodiment, polynucleotides encoding a Therapeutic protein portion of an albumin fusion protein of the invention do not comprise, or alternatively consist of, the naturally occurring sequence of that Therapeutic protein. In a further embodiment, polynucleotides encoding an albumin protein portion of an albumin fusion protein of the invention do not comprise, or alternatively consist of, the naturally occurring sequence of albumin protein. In an alternative embodiment, polynucleotides encoding an albumin fusion protein of the invention do not comprise, or alternatively consist of, the naturally occurring sequence of a Therapeutic protein portion or the albumin protein portion.

[0103] Naturally occurring variants are called “allelic variants,” and refer to one of several alternate forms of a gene occupying a given locus on a chromosome of an organism. (Genes II, Lewin, B., ed., John Wiley & Sons, New York (1985)). These allelic variants can vary at either the polynucleotide and/or polypeptide level and are included in the present invention. Alternatively, non-naturally occurring variants may be produced by mutagenesis techniques or by direct synthesis.

[0104] Using known methods of protein engineering and recombinant DNA technology, variants may be generated to improve or alter the characteristics of the polypeptides of the present invention. For instance, one or more amino acids can be deleted from the N-terminus or C-terminus of the polypeptide of the present invention without substantial loss of biological function. As an example, Ron et al. (J. Biol. Chem. 268: 2984-2988 (1993)) reported variant KGF proteins having heparin binding activity even after deleting 3, 8, or 27 amino-terminal amino acid residues. Similarly, Interferon gamma exhibited up to ten times higher activity after deleting 8-10 amino acid residues from the carboxy terminus of this protein. (Dobeli et al., J. Biotechnology 7:199-216 (1988).)

[0105] Moreover, ample evidence demonstrates that variants often retain a biological activity similar to that of the naturally occurring protein. For example, Gayle and coworkers (J. Biol. Chem. 268:22105-22111 (1993)) conducted extensive mutational analysis of human cytokine IL-1a. They used random mutagenesis to generate over 3,500 individual IL-1a mutants that averaged 2.5 amino acid changes per variant over the entire length of the molecule. Multiple mutations were examined at every possible amino acid position. The investigators found that “[m]ost of the molecule could be altered with little effect on either [binding or biological activity].” In fact, only 23 unique amino acid sequences, out of more than 3,500 nucleotide sequences examined, produced a protein that significantly differed in activity from wild-type.

[0106] Furthermore, even if deleting one or more amino acids from the N-terminus or C-terminus of a polypeptide results in modification or loss of one or more biological functions, other biological activities may still be retained. For example, the ability of a deletion variant to induce and/or to bind antibodies which recognize the secreted form will likely be retained when less than the majority of the residues of the secreted form are removed from the N-terminus or C-terminus. Whether a particular polypeptide lacking N— or C-terminal residues of a protein retains such immunogenic activities can readily be determined by routine methods described herein and otherwise known in the art.

[0107] Thus, the invention further includes polypeptide variants which have a functional activity (e.g., biological activity and/or therapeutic activity). In highly preferred embodiments the invention provides variants of albumin fusion proteins that have a functional activity (e.g., biological activity and/or therapeutic activity) that corresponds to one or more biological and/or therapeutic activities of the Therapeutic protein corresponding to the Therapeutic protein portion of the albumin fusion protein. Such variants include deletions, insertions, inversions, repeats, and substitutions selected according to general rules known in the art so as have little effect on activity.

[0108] In preferred embodiments, the variants of the invention have conservative substitutions. By “conservative substitutions” is intended swaps within groups such as replacement of the aliphatic or hydrophobic amino acids Ala, Val, Leu and Ble; replacement of the hydroxyl residues Ser and Thr; replacement of the acidic residues Asp and Glu; replacement of the amide residues Asn and Gln, replacement of the basic residues Lys, Arg, and His; replacement of the aromatic residues Phe, Tyr, and Trp, and replacement of the small-sized amino acids Ala, Ser, Thr, Met, and Gly.

[0109] Guidance concerning how to make phenotypically silent amino acid substitutions is provided, for example, in Bowie et al., “Deciphering the Message in Protein Sequences: Tolerance to Amino Acid Substitutions,” Science 247:1306-1310 (1990), wherein the authors indicate that there are two main strategies for studying the tolerance of an amino acid sequence to change.

[0110] The first strategy exploits the tolerance of amino acid substitutions by natural selection during the process of evolution. By comparing amino acid sequences in different species, conserved amino acids can be identified. These conserved amino acids are likely important for protein function. In contrast, the amino acid positions where substitutions have been tolerated by natural selection indicates that these positions are not critical for protein function. Thus, positions tolerating amino acid substitution could be modified while still maintaining biological activity of the protein.

[0111] The second strategy uses genetic engineering to introduce amino acid changes at specific positions of a cloned gene to identify regions critical for protein function. For example, site directed mutagenesis or alanine-scanning mutagenesis (introduction of single alanine mutations at every residue in the molecule) can be used. See Cunningham and Wells, Science 244:1081-1085 (1989). The resulting mutant molecules can then be tested for biological activity.

[0112] As the authors state, these two strategies have revealed that proteins are surprisingly tolerant of amino acid substitutions. The authors further indicate which amino acid changes are likely to be permissive at certain amino acid positions in the protein. For example, most buried (within the tertiary structure of the protein) amino acid residues require nonpolar side chains, whereas few features of surface side chains are generally conserved. Moreover, tolerated conservative amino acid substitutions involve replacement of the aliphatic or hydrophobic amino acids Ala, Val, Leu and De; replacement of the hydroxyl residues Ser and Thr; replacement of the acidic residues Asp and Glu; replacement of the amide residues Asn and Gtn, replacement of the basic residues Lys, Arg, and His; replacement of the aromatic residues Phe, Tyr, and Trp, and replacement of the small-sized amino acids Ala, Ser, Thr, Met, and Gly. Besides conservative amino acid substitution, variants of the present invention include (i) polypeptides containing substitutions of one or more of the non-conserved amino acid residues, where the substituted amino acid residues may or may not be one encoded by the genetic code, or (ii) polypeptides containing substitutions of one or more of the amino acid residues having a substituent group, or (iii) polypeptides which have been fused with or chemically conjugated to another compound, such as a compound to increase the stability and/or solubility of the polypeptide (for example, polyethylene glycol), (iv) polypeptide containing additional amino acids, such as, for example, an IgG Fc fusion region peptide. Such variant polypeptides are deemed to be within the scope of those skilled in the art from the teachings herein.

[0113] For example, polypeptide variants containing amino acid substitutions of charged amino acids with other charged or neutral amino acids may produce proteins with improved characteristics, such as less aggregation. Aggregation of pharmaceutical formulations both reduces activity and increases clearance due to the aggregate's immunogenic activity. See Pinckard et al., Clin. Exp. Immunol. 2:331-340 (1967); Robbins et al., Diabetes 36: 838-845 (1987); Cleland et al., Crit. Rev. Therapeutic Drug Carrier Systems 10:307-377 (1993).

[0114] In specific embodiments, the polypeptides of the invention comprise, or alternatively, consist of, fragments or variants of the amino acid sequence of a Therapeutic protein described herein and/or human serum albumin, and/or albumin fusion protein of the invention, wherein the fragments or variants have 1-5, 5-10, 5-25, 5-50, 10-50 or 50-150, amino acid residue additions, substitutions, and/or deletions when compared to the reference amino acid sequence. In preferred embodiments, the amino acid substitutions are conservative. Nucleic acids encoding these polypeptides are also encompassed by the invention.

[0115] The polypeptide of the present invention can be composed of amino acids joined to each other by peptide bonds or modified peptide bonds, i.e., peptide isosteres, and may contain amino acids other than the 20 gene-encoded amino acids. The polypeptides may be modified by either natural processes, such as post-translational processing, or by chemical modification techniques which are well known in the art. Such modifications are well described in basic texts and in more detailed monographs, as well as in a voluminous research literature. Modifications can occur anywhere in a polypeptide, including the peptide backbone, the amino acid side-chains and the amino or carboxyl termini. It will be appreciated that the same type of modification may be present in the same or varying degrees at several sites in a given polypeptide. Also, a given polypeptide may contain many types of modifications. Polypeptides may be branched, for example, as a result of ubiquitination, and they may be cyclic, with or without branching. Cyclic, branched, and branched cyclic polypeptides may result from posttranslation natural processes or may be made by synthetic methods. Modifications include acetylation, acylation, ADP-ribosylation, amidation, covalent attachment of flavin, covalent attachment of a heme moiety, covalent attachment of a nucleotide or nucleotide derivative, covalent attachment of a lipid or lipid derivative, covalent attachment of phosphotidylinositol, cross-linking, cyclization, disulfide bond formation, demethylation, formation of covalent cross-links, formation of cysteine, formation of pyroglutamate, formylation, gamma-carboxylation, glycosylation, GPI anchor formation, hydroxylation, iodination, methylation, myristylation, oxidation, pegylation, proteolytic processing, phosphorylation, prenylation, racemization, selenoylation, sulfation, transfer-RNA mediated addition of amino acids to proteins such as arginylation, and ubiquitination. (See, for instance, PROTEINS—STRUCTURE AND MOLECULAR PROPERTIES, 2nd Ed., T. E. Creighton, W. H. Freeman and Company, New York (1993); POST-TRANSLATIONAL COVALENT MODIFICATION OF PROTEINS, B. C. Johnson, Ed., Academic Press, New York, pgs. 1-12 (1983); Seifter et al., Meth. Enzymol. 182:626-646 (1990); Rattan et al., Ann. N.Y. Acad. Sci. 663:48-62 (1992)).

[0116] Functional Activity

[0117] “A polypeptide having functional activity” refers to a polypeptide capable of displaying one or more known functional activities associated with the full-length, pro-protein, and/or mature form of a Therapeutic protein. Such functional activities include, but are not limited to, biological activity, antigenicity [ability to bind (or compete with a polypeptide for binding) to an anti-polypeptide antibody], immunogenicity (ability to generate antibody which binds to a specific polypeptide of the invention), ability to form multimers with polypeptides of the invention, and ability to bind to a receptor or ligand for a polypeptide.

[0118] “A polypeptide having biological activity” refers to a polypeptide exhibiting activity similar to, but not necessarily identical to, an activity of a Therapeutic protein of the present invention, including mature forms, as measured in a particular biological assay, with or without dose dependency. In the case where dose dependency does exist, it need not be identical to that of the polypeptide, but rather substantially similar to the dose-dependence in a given activity as compared to the polypeptide of the present invention (i.e., the candidate polypeptide will exhibit greater activity or not more than about 25-fold less and, preferably, not more than about tenfold less activity, and most preferably, not more than about three-fold less activity relative to the polypeptide of the present invention).

[0119] In preferred embodiments, an albumin fusion protein of the invention has at least one biological and/or therapeutic activity associated with the Therapeutic protein (or fragment or variant thereof) when it is not fused to albumin.

[0120] The albumin fusion proteins of the invention can be assayed for functional activity (e.g., biological activity) using or routinely modifying assays known in the art, as well as assays described herein. Additionally, one of skill in the art may routinely assay fragments of a Therapeutic protein corresponding to a Therapeutic protein portion of an albumin fusion protein of the invention, for activity using assays referenced in its corresponding row of Table 1. Further, one of skill in the art may routinely assay fragments of an albumin protein corresponding to an albumin protein portion of an albumin fusion protein of the invention, for activity using assays known in the art and/or as described in the Examples section below.

[0121] For example, in one embodiment where one is assaying for the ability of an albumin fusion protein of the invention to bind or compete with a Therapeutic protein for binding to an anti-Therapeutic polypeptide antibody and/or anti-albumin antibody, various immunoassays known in the art can be used, including but not limited to, competitive and non-competitive assay systems using techniques such as radioimmunoassays, ELISA (enzyme linked immunosorbent assay), “sandwich” immunoassays, immunoradiometric assays, gel diffusion precipitation reactions, immunodiffusion assays, in situ immunoassays (using colloidal gold, enzyme or radioisotope labels, for example), western blots, precipitation reactions, agglutination assays (e.g., gel agglutination assays, hemagglutination assays), complement fixation assays, immunofluorescence assays, protein A assays, and immunoelectrophoresis assays, etc. In one embodiment, antibody binding is detected by detecting a label on the primary antibody. In another embodiment, the primary antibody is detected by detecting binding of a secondary antibody or reagent to the primary antibody. In a further embodiment, the secondary antibody is labeled. Many means are known in the art for detecting binding in an immunoassay and are within the scope of the present invention.

[0122] In a preferred embodiment, where a binding partner (e.g., a receptor or a ligand) of a Therapeutic protein is identified, binding to that binding partner by an albumin fusion protein containing that Therapeutic protein as the Therapeutic protein portion of the fusion can be assayed, e.g., by means well-known in the art, such as, for example, reducing and non-reducing gel chromatography, protein affinity chromatography, and affinity blotting. See generally, Phizicky et al., Microbiol. Rev. 59:94-123 (1995). In another embodiment, the ability of physiological correlates of an albumin fusion protein of the present invention to bind to a substrate(s) of the Therapeutic polypeptide corresponding to the Therapeutic portion of the albumin fusion protein of the invention can be routinely assayed using techniques known in the art.

[0123] In an alternative embodiment, where the ability of an albumin fusion protein of the invention to multimerize is being evaluated, association with other components of the multimer can be assayed, e.g., by means well-known in the art, such as, for example, reducing and non-reducing gel chromatography, protein affinity chromatography, and affinity blotting. See generally, Phizicky et al., supra.

[0124] In preferred embodiments, an albumin fusion protein of the invention comprising all or a portion of an antibody that binds a Therapeutic protein, has at least one biological and/or therapeutic activity (e.g., to specifically bind a polypeptide or epitope) associated with the antibody that binds a Therapeutic protein (or fragment or variant thereof) when it is not fused to albumin. In other preferred embodiments, the biological activity and/or therapeutic activity of an albumin fusion protein of the invention comprising all or a portion of an antibody that binds a Therapeutic protein is the inhibition (i.e. antagonism) or activation (i.e., agonism) of one or more of the biological activities and/or therapeutic activities associated with the polypeptide that is specifically bound by antibody that binds a Therapeutic protein.

[0125] Albumin fusion proteins of the invention (e.g., comprising at least a fragment or variant of an antibody that binds a Therapeutic protein) may be characterized in a variety of ways. In particular, albumin fusion proteins of the invention comprising at least a fragment or variant of an antibody that binds a Therapeutic protein may be assayed for the ability to specifically bind to the same antigens specifically bound by the antibody that binds a Therapeutic protein corresponding to the Therapeutic protein portion of the albumin fusion protein using techniques described herein or routinely modifying techniques known in the art.

[0126] Assays for the ability of the albumin fusion proteins of the invention (e.g., comprising at least a fragment or variant of an antibody that binds a Therapeutic protein) to (specifically) bind a specific protein or epitope may be performed in solution (e.g., Houghten, Bio/Techniques 13:412421(1992)), on beads (e.g., Lam, Nature 354:82-84 (1991)), on chips (e.g., Fodor, Nature 364:555-556 (1993)), on bacteria (e.g., U.S. Pat. No. 5,223,409), on spores (e.g., U.S. Pat. Nos. 5,571,698; 5,403,484; and 5,223,409), on plasmids (e.g., Cull et al., Proc. Natl. Acad. Sci. USA 89:1865-1869 (1992)) or on phage (e.g., Scott and Smith, Science 249:386-390 (1990); Delvin, Science 249:404-406 (1990); Cwirla et al., Proc. Natl. Acad. Sci. USA 87:6378-6382 (1990); and Felici, J. Mol. Biol. 222:301-310 (1991)) (each of these references is incorporated herein in its entirety by reference). Albumin fusion proteins of the invention comprising at least a fragment or variant of a Therapeutic antibody may also be assayed for their specificity and affinity for a specific protein or epitope using or routinely modifying techniques described herein or otherwise known in the art.

[0127] The albumin fusion proteins of the invention comprising at least a fragment or variant of an antibody that binds a Therapeutic protein may be assayed for cross-reactivity with other antigens (e.g., molecules that have sequence/structure conservation with the molecule(s) specifically bound by the antibody that binds a Therapeutic protein (or fragment or variant thereof) corresponding to the Therapeutic protein portion of the albumin fusion protein of the invention) by any method known in the art.

[0128] Immunoassays which can be used to analyze (immunospecific) binding and cross-reactivity include, but are not limited to, competitive and non-competitive assay systems using techniques such as western blots, radioimmunoassays, ELISA (enzyme linked immunosorbent assay), “sandwich” immunoassays, immunoprecipitation assays, precipitin reactions, gel diffusion precipitin reactions, immunodiffusion assays, agglutination assays, complement-fixation assays, immunoradiometric assays, fluorescent immunoassays, and protein A immunoassays, to name but a few. Such assays are routine and well known in the art (see, e.g., Ausubel et al, eds, 1994, Current Protocols in Molecular Biology, Vol. 1, John Wiley & Sons, Inc., New York, which is incorporated by reference herein in its entirety). Exemplary immunoassays are described briefly below (but are not intended by way of limitation).

[0129] Immunoprecipitation protocols generally comprise lysing a population of cells in a lysis buffer such as RIPA buffer (1% NP-40 or Triton X-100, 1% sodium deoxycholate, 0.1% SDS, 0.15 M NaCI, 0.01 M sodium phosphate at pH 7.2, 1% Trasylol) supplemented with protein phosphatase and/or protease inhibitors (e.g., EDTA, PMSF, aprotinin, sodium vanadate), adding the albumin fusion protein of the invention (e.g., comprising at least a fragment or variant of an antibody that binds a Therapeutic protein) to the cell lysate, incubating for a period of time (e.g., 1 to 4 hours) at 40 degrees C., adding sepharose beads coupled to an anti-albumin antibody, for example, to the cell lysate, incubating for about an hour or more at 40 degrees C., washing the beads in lysis buffer and resuspending the beads in SDS/sample buffer. The ability of the albumin fusion protein of the invention to immunoprecipitate a particular antigen can be assessed by, e.g., western blot analysis. One of skill in the art would be knowledgeable as to the parameters that can be modified to increase the binding of the albumin fusion protein to an antigen and decrease the background (e.g., pre-clearing the cell lysate with sepharose beads). For further discussion regarding immunoprecipitation protocols see, e.g., Ausubel et al, eds, 1994, Current Protocols in Molecular Biology, Vol. 1, John Wiley & Sons, Inc., New York at 10.16.1.

[0130] Western blot analysis generally comprises preparing protein samples, electrophoresis of the protein samples in a polyacrylamide gel (e.g., 8%-20% SDS-PAGE depending on the molecular weight of the antigen), transferring the protein sample from the polyacrylamide gel to a membrane such as nitrocellulose, PVDF or nylon, blocking the membrane in blocking solution (e.g., PBS with 3% BSA or non-fat milk), washing the membrane in washing buffer (e.g., PBS-Tween 20), applying the albumin fusion protein of the invention (diluted in blocking buffer) to the membrane, washing the membrane in washing buffer, applying a secondary antibody (which recognizes the albumin fusion protein, e.g., an anti-human serum albumin antibody) conjugated to an enzymatic substrate (e.g., horseradish peroxidase or alkaline phosphatase) or radioactive molecule (e.g., ³²P or ¹²⁵I) diluted in blocking buffer, washing the membrane in wash buffer, and detecting the presence of the antigen. One of skill in the art would be knowledgeable as to the parameters that can be modified to increase the signal detected and to reduce the background noise. For further discussion regarding western blot protocols see, e.g., Ausubel et al, eds, 1994, Current Protocols in Molecular Biology, Vol. 1, John Wiley & Sons, Inc., New York at 10.8.1.

[0131] ELISAs comprise preparing antigen, coating the well of a 96-well microtiter plate with the antigen, washing away antigen that did not bind the wells, adding the albumin fusion protein (e.g., comprising at least a fragment or variant of an antibody that binds a Therapeutic protein) of the invention conjugated to a detectable compound such as an enzymatic substrate (e.g., horseradish peroxidase or alkaline phosphatase) to the wells and incubating for a period of time, washing away unbound or non-specifically bound albumin fusion proteins, and detecting the presence of the albumin fusion proteins specifically bound to the antigen coating the well. In ELISAs the albumin fusion protein does not have to be conjugated to a detectable compound; instead, a second antibody (which recognizes albumin fusion protein) conjugated to a detectable compound may be added to the well. Further, instead of coating the well with the antigen, the albumin fusion protein may be coated to the well. In this case, the detectable molecule could be the antigen conjugated to a detectable compound such as an enzymatic substrate (e.g., horseradish peroxidase or alkaline phosphatase). One of skill in the art would be knowledgeable as to the parameters that can be modified to increase the signal detected as well as other variations of ELISAs known in the art. For further discussion regarding ELISAs see, e.g., Ausubel et al, eds, 1994, Current Protocols in Molecular Biology, Vol. 1, John Wiley & Sons, Inc., New York at 11.2.1.

[0132] The binding affinity of an albumin fusion protein to a protein, antigen, or epitope and the off-rate of an albumin fusion protein-protein/antigen/epitope interaction can be determined by competitive binding assays. One example of a competitive binding assay is a radioimmunoassay comprising the incubation of labeled antigen (e.g., ³H or ¹²⁵I) with the albumin fusion protein of the invention in the presence of increasing amounts of unlabeled antigen, and the detection of the antibody bound to the labeled antigen. The affinity of the albumin fusion protein of the present invention for a specific protein, antigen, or epitope and the binding off-rates can be determined from the data by Scatchard plot analysis. Competition with a second protein that binds the same protein, antigen or epitope as the albumin fusion protein, can also be determined using radioimmunoassays. In this case, the protein, antigen or epitope is incubated with an albumin fusion protein of the present invention conjugated to a labeled compound (e.g., ³H or ¹²⁵I) in the presence of increasing amounts of an unlabled second protein that binds the same protein, antigen, or epitope as the albumin fusion protein of the invention.

[0133] In a preferred embodiment, BIAcore kinetic analysis is used to determine the binding on and off rates of albumin fusion proteins of the invention to a protein, antigen or epitope. BIAcore kinetic analysis comprises analyzing the binding and dissociation of albumin fusion proteins, or specific polypeptides, antigens or epitopes from chips with immobilized specific polypeptides, antigens or epitopes or albumin fusion proteins, respectively, on their surface.

[0134] Antibodies that bind a Therapeutic protein corresponding to the Therapeutic protein portion of an albumin fusion protein of the invention may also be described or specified in terms of their binding affinity for a given protein or antigen, preferably the antigen which they specifically bind. Preferred binding affinities include those with a dissociation constant or Kd less than 5×10⁻² M, 10⁻² M, 5×10⁻³ M, 10⁻³ M, 5×10⁻⁴ M, 10⁻⁴ M. More preferred binding affinities include those with a dissociation constant or Kd less than 5×10⁻⁵ M, 10⁻⁵ M, 5×10⁻⁶ M, 10⁻⁶M, 5×10⁻⁷ M, 10⁷ M, 5×10⁻⁸ M or 10⁻⁸ M. Even more preferred binding affinities include those with a dissociation constant or Kd less than 5×10⁻⁹ M, 10⁻⁹ M, 5×10⁻¹⁰ M, 10⁻¹⁰ M, 5×10⁻¹¹ M, 10⁻¹¹ M, 5×10⁻¹² M, ¹⁰⁻¹² M, 5×10⁻¹³ M, 10⁻¹³ M, 5×10⁻¹⁴ M, 10⁻¹⁴ M, 5×10⁻¹⁵ M, or 10⁻¹⁵ M. In preferred embodiments, albumin fusion proteins comprising at least a fragment or variant of an antibody that binds a Therapeutic protein, has an affinity for a given protein or epitope similar to that of the corresponding antibody (not fused to albumin) that binds a Therapeutic protein, taking into account the valency of the albumin fusion protein (comprising at least a fragment or variant of an antibody that binds a Therapeutic protein) and the valency of the corresponding antibody. In addition, assays described herein (see Examples and Table 1) and otherwise known in the art may routinely be applied to measure the ability of albumin fusion proteins of the present invention and fragments, variants and derivatives thereof to elicit biological activity and/or Therapeutic activity (either in vitro or in vivo) related to either the Therapeutic protein portion and/or albumin portion of the albumin fusion protein of the present invention. Other methods will be known to the skilled artisan and are within the scope of the invention.

[0135] Albumin

[0136] As described above, an albumin fusion protein of-the invention comprises at least a fragment or variant of a Therapeutic protein and at least a fragment or variant of human serum albumin, which are associated with one another, preferably by genetic fusion or chemical conjugation.

[0137] The terms, human serum albumin (HSA) and human albumin (HA) are used interchangeably herein. The terms, “albumin and “serum albumin” are broader, and encompass human serum albumin (and fragments and variants thereof) as well as albumin from other species (and fragments and variants thereof).

[0138] As used herein, “albumin” refers collectively to albumin protein or amino acid sequence, or an albumin fragment or variant, having one or more functional activities (e.g., biological activities) of albumin. In particular, “albumin” refers to human albumin or fragments thereof (see EP 201 239, EP 322 094 WO 97/24445, WO95/23857) especially the mature form of human albumin as shown in FIG. 15 and SEQ ID NO:18, or albumin from other vertebrates or fragments thereof, or analogs or variants of these molecules or fragments thereof.

[0139] In preferred embodiments, the human serum albumin protein used in the albumin fusion proteins of the invention contains one both of the following sets of point mutations with reference to SEQ ID NO:18: Leu-407 to Ala, Leu-408 to Val, Val-409 to Ala, and Arg-410 to Ala; or Arg-410 to A, Lys-413 to Gln, and Lys-414 to Gln (see, e.g., International Publication No. WO95/23857, hereby incorporated in its entirety by reference herein). In even more preferred embodiments, albumin fusion proteins of the invention that contain one or both of above-described sets of point mutations have improved stability/resistance to yeast Yap3p proteolytic cleavage, allowing increased production of recombinant albumin fusion proteins expressed in yeast host cells.

[0140] As used herein, a portion of albumin sufficient to prolong the therapeutic activity or shelf-fife of the Therapeutic protein refers to a portion of albumin sufficient in length or structure to stabilize or prolong the therapeutic activity of the protein so that the shelf life of the Therapeutic protein portion of the albumin fusion protein is prolonged or extended compared to the shelf-life in the non-fusion state. The albumin portion of the albumin fusion proteins may comprise the full length of the HA sequence as described above or as shown in FIG. 15, or may include one or more fragments thereof that are capable of stabilizing or prolonging the therapeutic activity. Such fragments may be of 10 or more amino acids in length or may include about 15, 20, 25, 30, 50, or more contiguous amino acids from the HA sequence or may include part or all of specific domains of HA. For instance, one or more fragments of HA spanning the first two immunoglobulin-like domains may be used.

[0141] The albumin portion of the albumin fusion proteins of the invention may be a variant of normal HA. The Therapeutic protein portion of the albumin fusion proteins of the invention may also be variants of the Therapeutic proteins as described herein. The term “variants” includes insertions, deletions and substitutions, either conservative or non conservative, where such changes do not substantially alter one or more of the oncotic, useful ligand-binding and non-immunogenic properties of albumin, or the active site, or active domain which confers the therapeutic activities of the Therapeutic proteins.

[0142] In particular, the albumin fusion proteins of the invention may include naturally occurring polymorphic variants of human albumin and fragments of human albumin, for example those fragments disclosed in EP 322 094 (namely HA (Pn), where n is 369 to 419). The albumin may be derived from any vertebrate, especially any mammal, for example human, cow, sheep, or pig. Non-mammalian albumins include, but are not limited to, hen and salmon. The albumin portion of the albumin fusion protein may be from a different animal than the Therapeutic protein portion.

[0143] Generally speaking, an HA fragment or variant will be at least 100 amino acids long, preferably at least 150 amino acids long. The HA variant may consist of or alternatively comprise at least one whole domain of HA, for example domains I (amino acids 1-194 of SEQ ID NO:18), 2 (amino acids 195-387 of SEQ ID NO:18), 3 (amino acids 388-585 of SEQ ID NO:18), 1+2 (1-387 of SEQ ID NO:18), 2+3 (195-585 of SEQ ID NO:18) or 1+3 (amino acids 1-194 of SEQ ID NO:18+amino acids 388-585 of SEQ ID NO:18). Each domain is itself made up of two homologous subdomains namely 1-105, 120-194, 195-291, 316-387, 388-491 and 512-585, with flexible inter-subdomain linker regions comprising residues Lys106 to Glu119, Glu292 to Val315 and Glu492 to Ala511.

[0144] Preferably, the albumin portion of an albumin fusion protein of the invention comprises at least one subdomain or domain of HA or conservative modifications thereof. If the fusion is based on subdomains, some or all of the adjacent linker is preferably used to link to the Therapeutic protein moiety.

[0145] Antibodies that Specifically Bind Therapeutic Proteins are Also Therapeutic Proteins

[0146] The present invention also encompasses albumin fusion proteins that comprise at least a fragment or variant of an antibody that specifically binds a Therapeutic protein disclosed in Table 1. It is specifically contemplated that the term “Therapeutic protein” encompasses antibodies that bind a Therapeutic protein (e.g., as Described in column I of Table 1) and fragments and variants thereof. Thus an albumin fusion protein of the invention may contain at least a fragment or variant of a Therapeutic protein, and/or at least a fragment or variant of an an antibody that binds a Therapeutic protein.

[0147] Antibody Structure and Background

[0148] The basic antibody structural unit is known to comprise a tetramer. Each tetramer is composed of two identical pairs of polypeptide chains, each pair having one “light” (about 25 kDa) and one “heavy” chain (about 50-70 kDa). The amino-terminal portion of each chain includes a variable region of about 100 to 110 or more amino acids primarily responsible for antigen recognition. The carboxy-terminal portion of each chain defines a constant region primarily responsible for effector function. Human light chains are classified as kappa and lambda light chains. Heavy chains are classified as mu, delta, gamma, alpha, or epsilon, and define the antibody's isotype as IgM, IgD, IgG, IgA, and IgE, respectively. See generally, Fundamental Immunology Chapters 3-5 (Paul, W., ed., 4th ed. Raven Press, N.Y. (1998)) (incorporated by reference in its entirety for all purposes). The variable regions of each light/heavy chain pair form the antibody binding site.

[0149] Thus, an intact IgG antibody has two binding sites. Except in bifunctional or bispecific antibodies, the two binding sites are the same.

[0150] The chains all exhibit the same general structure of relatively conserved framework regions (FR) joined by three hypervariable regions, also called complementarity determining regions or CDRs. The CDR regions, in general, are the portions of the antibody which make contact with the antigen and determine its specificity. The CDRs from the heavy and the light chains of each pair are aligned by the framework regions, enabling binding to a specific epitope. From N-terminal to C-terminal, both light and heavy chains variable regions comprise the domains FR1, CDR1, FR2, CDR2, FR3, CDR3 and FR4. The variable regions are connected to the heavy or light chain constant region. The assignment of amino acids to each domain is in accordance with the definitions of Kabat Sequences of Proteins of Immunological Interest (National Institutes of Health, Bethesda, Md. (1987 and 1991)), or Chothia & Lesk J Mol. Biol. 196:901-917 (1987); Chothia et al. Nature 342:878-883 (1989).

[0151] As used herein, “antibody” refers to immunoglobulin molecules and immunologically active portions of immunoglobulin molecules, i.e., molecules that contain an antigen binding site that specifically binds an antigen (e.g., a molecule containing one or more CDR regions of an antibody). Antibodies that may correspond to a Therapeutic protein portion of an albumin fusion protein include, but are not limited to, monoclonal, multispecific, human, humanized or chimeric antibodies, single chain antibodies (e.g., single chain Fvs), Fab fragments, F(ab′) fragments, fragments produced by a Fab expression library, anti-idiotypic (anti-Id) antibodies (including, e.g., anti-Id antibodies specific to antibodies of the invention), and epitope-binding fragments of any of the above (e.g., VH domains, VL domains, or one or more CDR regions).

[0152] Antibodies that Bind Therapeutic Proteins

[0153] The present invention encompasses albumin fusion proteins that comprise at least a fragment or variant of an antibody that binds a Therapeutic Protein (e.g., as disclosed in Table 1) or fragment or variant thereof.

[0154] Antibodies that bind a Therapeutic protein (or fragment or variant thereof) may be from any animal origin, including birds and mammals. Preferably, the antibodies are human, murine (e.g., mouse and rat), donkey, sheep, rabbit, goat, guinea pig, camel, horse, or chicken antibodies. Most preferably, the antibodies are human antibodies. As used herein, “human” antibodies include antibodies having the amino acid sequence of a human immunoglobulin and include antibodies isolated from human immunoglobulin libraries and xenomice or other organisms that have been genetically engineered to produce human antibodies.

[0155] The antibody molecules that bind to a Therapeutic protein and that may correspond to a Therapeutic protein portion of an albumin fusion protein of the invention can be of any type (e.g., IgG, IgE, IgM, IgD, IgA and IgY), class (e.g., IgG1, IgG2, IgG3, IgG4, IgA1 and IgA2) or subclass of immunoglobulin molecule. In preferred embodiments, the antibody molecules that bind to a Therapeutic protein and that may correspond to a Therapeutic protein portion of an albumin fusion protein of the invention are IgG1. In other preferred embodiments, the immunoglobulin molecules that bind to a Therapeutic protein and that may correspond to a Therapeutic protein portion of an albumin fusion protein of the invention are IgG2. In other preferred embodiments, the immunoglobulin molecules that bind to a Therapeutic protein and that may correspond to a Therapeutic protein portion of an albumin fusion protein of the invention are IgG4.

[0156] Most preferably the antibodies that bind to a Therapeutic protein and that may correspond to a Therapeutic protein portion of an albumin fusion protein of the invention are human antigen-binding antibody fragments of the present invention and include, but are not limited to, Fab, Fab′ and F(ab′)2, Fd, single-chain Fvs (scFv), single-chain antibodies, disulfide-linked Fvs (sdFv) and fragments comprising either a VL or VH domain. Antigen-binding antibody fragments, including single-chain antibodies, may comprise the variable region(s) alone or in combination with the entirety or a portion of the following: hinge region, CH1, CH2, and CH3 domains.

[0157] The antibodies that bind to a Therapeutic protein and that may correspond to a Therapeutic protein portion of an albumin fusion protein of the invention may be monospecific, bispecific, trispecific or of greater multispecificity. Multispecific antibodies may be specific for different epitopes of a Therapeutic protein or may be specific for both a Therapeutic protein as well as for a heterologous epitope, such as a heterologous polypeptide or solid support material. See, e.g., PCT publications WO 93/17715; WO 92/08802; WO 91/00360; WO 92/05793; Tutt, et al., J. Immunol. 147:60-69 (1991); U.S. Pat. Nos. 4,474,893; 4,714,681; 4,925,648; 5,573,920; 5,601,819; Kostelny et al., J. Immunol. 148:1547-1553 (1992).

[0158] Antibodies that bind a Therapeutic protein (or fragment or variant thereof) may be bispecific or bifunctional which means that the antibody is an artificial hybrid antibody having two different heavy/light chain pairs and two different binding sites. Bispecific antibodies can be produced by a variety of methods including fusion of hybridomas or linking of Fab′ fragments. See, e.g., Songsivilai & Lachmann Clin. Exp. Immunol. 79: 315-321 (1990), Kostelny et al. J Immunol. 148:1547 1553 (1992). In addition, bispecific antibodies may be formed as “diabodies” (Holliger et al. “‘Diabodies’: small bivalent and bispecific antibody fragments” PNAS USA 90:6444-6448 (1993)) or “Janusins” (Traunecker et al. “Bispecific single chain molecules (Janusins) target cytotoxic lymphocytes on HIV infected cells” EMBO J 10:3655-3659 (1991) and Traunecker et al. “Janusin: new molecular design for bispecific reagents” Int J Cancer Suppl 7:51-52 (1992)).

[0159] The present invention also provides albumin fusion proteins that comprise, fragments or variants (including derivatives) of antibody described herein or known elsewhere in the art. Standard techniques known to those of skill in the art can be used to introduce mutations in the nucleotide sequence encoding a molecule of the invention, including, for example, site-directed mutagenesis and PCR-mediated mutagenesis which result in amino acid substitutions. Preferably, the variants (including derivatives) encode less than 50 amino acid substitutions, less than 40 amino acid subsitutions, less than 30 amino acid substitutions, less than 25 amino acid substitutions, less than 20 amino acid substitutions, less than 15 amino acid substitutions, less than 10 amino acid substitutions, less than 5 amino acid substitutions, less than 4 amino acid substitutions, less than 3 amino acid substitutions, or less than 2 amino acid substitutions relative to the reference VH domain, VHCDR1, VHCDR2, VHCDR3, VL domain, VLCDR1, VLCDR2, or VLCDR3. In specific embodiments, the variants encode substitutions of VHCDR3. In a preferred embodiment, the variants have conservative amino acid substitutions at one or more predicted non-essential amino acid residues.

[0160] Antibodies that bind to a Therapeutic protein and that may correspond to a Therapeutic protein portion of an albumin fusion protein of the invention may be described or specified in terms of the epitope(s) or portion(s) of a Therapeutic protein which they recognize or specifically bind. Antibodies which specifically bind a Therapeutic protein or a specific epitope of a Therapeutic protein may also be excluded. Therefore, the present invention encompasses antibodies that specifically bind Therapeutic proteins, and allows for the exclusion of the same. In preferred embodiments, albumin fusion proteins comprising at least a fragment or variant of an antibody that binds a Therapeutic protein, binds the same epitopes as the.

[0161] Antibodies that bind to a Therapeutic protein and that may correspond to a Therapeutic protein portion of an albumin fusion protein of the invention may also be described or specified in terms of their cross-reactivity. Antibodies that do not bind any other analog, ortholog, or homolog of a Therapeutic protein are included. Antibodies that bind polypeptides with at least 95%, at least 90%, at least 85%, at least 80%, at least 75%, at least 70%, at least 65%, at least 60%, at least 55%, and at least 50% identity (as calculated using methods known in the art and described herein) to a Therapeutic protein are also included in the present invention. In specific embodiments, antibodies that bind to a Therapeutic protein and that may correspond to a Therapeutic protein portion of an albumin fusion protein of the invention cross-react with murine, rat and/or rabbit homologs of human proteins and the corresponding epitopes thereof. Antibodies that do not bind polypeptides with less than 95%, less than 90%, less than 85%, less than 80%, less than 75%, less than 70%, less than 65%, less than 60%, less than 55%, and less than 50% identity (as calculated using methods known in the art and described herein) to a Therapeutic protein are also included in the present invention. In a specific embodiment, the above-described cross-reactivity is with respect to any single specific antigenic or immunogenic polypeptide, or combination(s) of 2, 3, 4, 5, or more of the specific antigenic and/or immunogenic polypeptides disclosed herein. In preferred embodiments, albumin fusion proteins comprising at least a fragment or variant of an antibody that binds a Therapeutic protein, has similar or substantially identical cross reactivity characteristics compared to the.

[0162] Further included in the present invention are antibodies which bind polypeptides encoded by polynucleotides which hybridize to a polynucleotide encoding a Therapeutic protein under stringent hybridization conditions (as described herein). Antibodies that bind to a Therapeutic protein and that may correspond to a Therapeutic protein portion of an albumin fusion protein of the invention may also be described or specified in terms of their binding affinity to a polypeptide of the invention. Preferred binding affinities include those with a dissociation constant or Kd less than 5×10⁻² M, 10⁻² M, 5×10⁻³ M, 10⁻³ M, 5×10⁻⁴ M, 10⁻⁴ M. More preferred binding affinities include those with a dissociation constant or Kd less than 5×10⁻⁵ M, 10⁻⁵ M, 5×10⁻⁶ M, 10⁻⁶ M, 5×10⁻⁷ M, 10⁷ M, 5×10⁻⁸ M, or 10⁻⁸ M. Even more preferred binding affinities include those with a dissociation constant or Kd less than 5×10⁻⁹ M, 10⁻⁹ M, 5×10⁻¹⁰ M, 10⁻¹⁰ M, 5×10⁻¹¹ M, 10⁻¹¹ M, 5×10⁻¹² M, ¹⁰⁻¹² M, 5×10⁻¹³ M, 10⁻¹³ M, 5×10⁻¹⁴ M, 10⁻¹⁴ M, 5×10⁻¹⁵ M, or 10⁻¹⁵ M. In preferred embodiments, albumin fusion proteins comprising at least a fragment or variant of an antibody that binds a Therapeutic protein, has an affinity for a given protein or epitope similar to that of the corresponding antibody (not fused to albumin) that binds a Therapeutic protein, taking into account the valency of the albumin fusion protein (comprising at least a fragment or variant of an antibody that binds a Therapeutic protein) and the valency of the corresponding antibody.

[0163] The invention also provides antibodies that competitively inhibit binding of an antibody to an epitope of a Therapeutic protein as determined by any method known in the art for determining competitive binding, for example, the immunoassays described herein. In preferred embodiments, the antibody competitively inhibits binding to the epitope by at least 95%, at least 90%, at least 85%, at least 80%, at least 75%, at least 70%, at least 60%, or at least 50%. In preferred embodiments, albumin fusion proteins comprising at least a fragment or variant of an antibody that binds a Therapeutic protein, competitively inhibits binding of an antibody to an epitope of a Therapeutic protein as well as the competitively inhibits binding of an antibody to an epitope of a Therapeutic protein. In other preferred embodiments, albumin fusion proteins comprising at least a fragment or variant of an antibody that binds a Therapeutic protein, competitively inhibits binding of the to an epitope of a Therapeutic protein by at least 95%, at least 90%, at least 85 %, at least 80%, at least 75%, at least 70%, at least 60%, or at least 50%.

[0164] Antibodies that bind to a Therapeutic protein and that may correspond to a Therapeutic protein portion of an albumin fusion protein of the invention may act as agonists or antagonists of the Therapeutic protein. For example, the present invention includes antibodies which disrupt the receptor/ligand interactions with the polypeptides of the invention either partially or fully. The invention features both receptor-specific antibodies and ligand-specific antibodies. The invention also features receptor-specific antibodies which do not prevent ligand binding but prevent receptor activation. Receptor activation (i.e., signaling) may be determined by techniques described herein or otherwise known in the art. For example, receptor activation can be determined by detecting the phosphorylation (e.g., tyrosine or serine/threonine) of the receptor or its substrate by immunoprecipitation followed by western blot analysis (for example, as described supra). In specific embodiments, antibodies are provided that inhibit ligand activity or receptor activity by at least 95%, at least 90%, at least 85%, at least 80%, at least 75%, at least 70%, at least 60%, or at least 50% of the activity in absence of the antibody. In preferred embodiments, albumin fusion proteins comprising at least a fragment or variant of an antibody that binds a Therapeutic protein, has similar or substantially similar characteristics with regard to preventing ligand binding and/or preventing receptor activation compared to the.

[0165] The invention also features receptor-specific antibodies which both prevent llgand binding and receptor activation as well as antibodies that recognize the receptor-ligand complex, and, preferably, do not specifically recognize the unbound receptor or the unbound ligand. Likewise, included in the invention are neutralizing antibodies which bind the ligand and prevent binding of the ligand to the receptor, as well as antibodies which bind the ligand, thereby preventing receptor activation, but do not prevent the ligand from binding the receptor. Further included in the invention are antibodies which activate the receptor. These antibodies may act as receptor agonists, i.e., potentiate or activate either all or a subset of the biological activities of the ligand-mediated receptor activation, for example, by inducing dimerization of the receptor. The antibodies may be specified as agonists, antagonists or inverse agonists for biological activities comprising the specific biological activities of the Therapeutic protreins (e.g. as disclosed in Table 1). The above antibody agonists can be made using methods known in the art. See, e.g., PCT publication WO 96/40281; U.S. Pat. No. 5,811,097; Deng et al., Blood 92(6):1981-1988 (1998); Chen et al., Cancer Res. 58(16):3668-3678 (1998); Harrop et al., J. Immunol. 161(4):1786-1794 (1998); Zhu et al., Cancer Res. 58(15):3209-3214 (1998); Yoon et al., J. Immunol. 160(7):3170-3179 (1998); Prat et al., J. Cell. Sci. 111(Pt2):237-247 (1998); Pitard et al., J. Immunol. Methods 205(2):177-190 (1997); Liautard et al., Cytokine 9(4):233-241 (1997); Carlson et al., J. Biol. Chem. 272(17): 11295-11301 (1997); Taryman et al., Neuron 14(4):755-762 (1995); Muller et al., Structure 6(9):1153-1167 (1998); Bartunek et al., Cytokine 8(1):14-20 (1996) (which are all incorporated by reference herein in their entireties). In preferred embodiments, albumin fusion proteins comprising at least a fragment or variant of an antibody that binds a Therapeutic protein, have similar or substantially identical agonist or antagonist properties as the.

[0166] Antibodies that bind to a Therapeutic protein and that may correspond to a Therapeutic protein portion of an albumin fusion protein of the invention may be used, for example, to purify, detect, and target Therapeutic proteins, including both in in vitro and in vivo diagnostic and therapeutic methods. For example, the antibodies have utility in immunoassays for qualitatively and quantitatively measuring levels of the Therapeutic protein in biological samples. See, e.g., Harlow et al., Antibodies: A Laboratory Manual, (Cold Spring Harbor Laboratory Press, 2nd ed. 1988); incorporated by reference herein in its entirety. Likewise, albumin fusion proteins comprising at least a fragment or variant of an antibody that binds a Therapeutic protein, may be used, for example, to purify, detect, and target Therapeutic proteins, including both in in vitro and in vivo diagnostic and therapeutic methods.

[0167] Antibodies that bind to a Therapeutic protein and that may correspond to a Therapeutic protein portion of an albumin fusion protein include derivatives that are modified, i.e, by the covalent, attachment of any type of molecule to the antibody. For example, but not by way of limitation, the antibody derivatives include antibodies that have been modified, e.g., by glycosylation, acetylation, pegylation, phosphylation, amidation, derivatization by known protecting/blocking groups, proteolytic cleavage, linkage to a cellular ligand or other protein, etc. Any of numerous chemical modifications may be carried out by known techniques, including, but not limited to specific chemical cleavage, acetylation, formylation, metabolic synthesis of tunicamycin, etc. Additionally, the derivative may contain one or more non-classical amino acids. Albumin fusion proteins of the invention may also be modified as described above.

[0168] Methods of Producing Antibodies that Bind Therapeutic Proteins

[0169] The antibodies that bind to a Therapeutic protein and that may correspond to a Therapeutic protein portion of an albumin fusion protein of the invention may be generated by any suitable method known in the art. Polyclonal antibodies to an antigen-of-interest can be produced by various procedures well known in the art. For example, a Therapeutic protein may be administered to various host animals including, but not limited to, rabbits, mice, rats, etc. to induce the production of sera containing polyclonal antibodies specific for the antigen. Various adjuvants may be used to increase the immunological response, depending on the host species, and include but are not limited to, Freund's (complete and incomplete), mineral gels such as aluminum hydroxide, surface active substances such as lysolecithin, pluronic polyols, polyanions, peptides, oil emulsions, keyhole limpet hemocyanins, dinitrophenol, and potentially useful human adjuvants such as BCG (bacilie Calmette-Guerin) and corynebacterium parvum. Such adjuvants are also well known in the art.

[0170] Monoclonal antibodies can be prepared using a wide variety of techniques known in the art including the use of hybridoma, recombinant, and phage display technologies, or a combination thereof. For example, monoclonal antibodies can be produced using hybridoma techniques including those known in the art and taught, for example, in Harlow et al., Antibodies: A Laboratory Manual, (Cold Spring Harbor Laboratory Press, 2nd ed. 1988); Hammerling, et al., in: Monoclonal Antibodies and T-Cell Hybridomas 563-681 (Elsevier, N.Y., 1981) (said references incorporated by reference in their entireties). The term “monoclonal antibody” as used herein is not limited to antibodies produced through hybridoma technology. The term “monoclonal antibody” refers to an antibody that is derived from a single clone, including any eukaryotic, prokaryotic, or phage clone, and not the method by which it is produced.

[0171] Methods for producing and screening for specific antibodies using hybridoma technology are routine and well known in the art. In a non-limiting example, mice can be immunized with a Therapeutic protein or fragment or variant thereof or a cell expressing such a Therapeutic protein or fragment or variant thereof. Once an immune response is detected, e.g., antibodies specific for the antigen are detected in the mouse serum, the mouse spleen is harvested and splenocytes isolated. The splenocytes are then fused by well known techniques to any suitable myeloma cells, for example cells from cell line SP20 available from the ATCC. Hybridomas are selected and cloned by limited dilution. The hybridoma clones are then assayed by methods known in the art for cells that secrete antibodies capable of binding a polypeptide of the invention. Ascites fluid, which generally contains high levels of antibodies, can be generated by immunizing mice with positive hybridoma clones.

[0172] Accordingly, the present, invention provides methods of generating monoclonal antibodies as well as antibodies produced by the method comprising culturing a hybridoma cell secreting an antibody wherein, preferably, the hybridoma is generated by fusing splenocytes isolated from a mouse immunized with an antigen of the invention with myeloma cells and then screening the hybridomas resulting from the fusion for hybridoma clones that secrete an antibody able to bind a polypeptide of the invention.

[0173] Another well known method for producing both polyclonal and monoclonal human B cell lines is transformation using Epstein Barr Virus (EBV). Protocols for generating EBV-transformed B cell lines are commonly known in the art, such as, for example, the protocol outlined in Chapter 7.22 of Current Protocols in Immunology, Coligan et al., Eds., 1994, John Wiley & Sons, NY, which is hereby incorporated in its entirety by reference. The source of B cells for transformation is commonly human peripheral blood, but B cells for transformation may also be derived from other sources including, but not limited to, lymph nodes, tonsil, spleen, tumor tissue, and infected tissues. Tissues are generally made into single cell suspensions prior to EBV transformation. Additionally, steps may be taken to either physically remove or inactivate T cells (e.g., by treatment with cyclosporin A) in B cell-containing samples, because T cells from individuals seropositive for anti-EBV antibodies can suppress B cell immortalization by EBV.

[0174] In general, the sample containing human B cells is innoculated with EBV, and cultured for 34 weeks. A typical source of EBV is the culture supernatant of the B95-8 cell line (ATCC #VR-1492). Physical signs of EBV transformation can generally be seen towards the end of the 3-4 week culture period. By phase-contrast microscopy, transformed cells may appear large, clear, hairy and tend to aggregate in tight clusters of cells. Initially, EBV lines are generally polyclonal. However, over prolonged periods of cell cultures, EBV lines may become monoclonal or polyclonal as a result of the selective outgrowth of particular B cell clones. Alternatively, polyclonal EBV transformed lines may be subcloned (e.g., by limiting dilution culture) or fused with a suitable fusion partner and plated at limiting dilution to obtain monoclonal B cell lines. Suitable fusion partners for EBV transformed cell lines include mouse myeloma cell lines (e.g., SP2/0, X63-Ag8.653), heteromyeloma cell lines (human×mouse; e.g., SPAM-8, SBC-H20, and CB-F7), and human cell lines (e.g., GM 1500, SKO-007, RPMI 8226, and KR4). Thus, the present invention also provides a method of generating polyclonal or monoclonal human antibodies against polypeptides of the invention or fragments thereof, comprising EBV-transformation of human B cells.

[0175] Antibody fragments which recognize specific epitopes may be generated by known techniques. For example, Fab and F(ab′)2 fragments of the invention may be produced by proteolytic cleavage of immunoglobulin molecules, using enzymes such as papain (to produce Fab fragments) or pepsin (to produce F(ab′)2 fragments). F(ab′)2 fragments contain the variable region, the light chain constant region and the CH1 domain of the heavy chain.

[0176] For example, antibodies that bind to a Therapeutic protein can also be generated using various phage display methods known in the art. In phage display methods, functional antibody domains are displayed on the surface of phage particles which carry the polynucleotide sequences encoding them. In a particular embodiment, such phage can be utilized to display antigen binding domains expressed from a repertoire or combinatorial antibody library (e.g., human or murine). Phage expressing an antigen binding domain that binds the antigen of interest can be selected or identified with antigen, e.g., using labeled antigen or antigen bound or captured to a solid surface or bead. Phage used in these methods are typically filamentous phage including fd and M13 binding domains expressed from phage with Fab, Fv or disulfide stabilized Fv antibody domains recombinantly fused to either the phage gene III or gene VIII protein. Examples of phage display methods that can be used to make antibodies that bind to a Therapeutic protein include those disclosed in Brinkman et al., J. Immunol. Methods 182:41-50 (1995); Ames et al., J. Immunol. Methods 184:177-186 (1995); Kettleborough et al., Eur. J. Immunol. 24:952-958 (1994); Persic et al., Gene 187 9-18 (1997); Burton et al., Advances in Immunology 57:191-280 (1994); PCT application No. PCT/GB91/01134; PCT publications WO 90/02809; WO 91/10737; WO 92/01047; WO 92/18619; WO 93/11236; WO 95/15982; WO 95/20401; and U.S. Pat. Nos. 5,698,426; 5,223,409; 5,403,484; 5,580,717; 5,427,908; 5,750,753; 5,821,047; 5,571,698; 5,427,908; 5,516,637; 5,780,225; 5,658,727; 5,733,743 and 5,969,108; each of which is incorporated herein by reference in its entirety.

[0177] As described in the above references, after phage selection, the antibody coding regions from the phage can be isolated and used to generate whole antibodies, including human antibodies, or any other desired antigen binding fragment, and expressed in any desired host, including mammalian cells, insect cells, plant cells, yeast, and bacteria, e.g., as described in detail below. For example, techniques to recombinantly produce Fab, Fab′ and F(ab′)2 fragments can also be employed using methods known in the art such as those disclosed in PCT publication WO 92/22324; Mullinax et al., BioTechniques 12(6):864-869 (1992); and Sawai et al., AJRI 34:26-34 (1995); and Better et al., Science 240:1041-1043 (1988) (said references incorporated by reference in their entireties).

[0178] Examples of techniques which can be used to produce single-chain Fvs and antibodies include those described in U.S. Pat. Nos. 4,946,778 and 5,258,498; Huston et al., Methods in Enzymology 203:46-88 (1991); Shu et al., PNAS 90:7995-7999 (1993); and Skerra et al., Science 240:1038-1040 (1988). For some uses, including in vivo use of antibodies in humans and in vitro detection assays, it may be preferable to use chimeric, humanized, or human antibodies. A chimeric antibody is a molecule in which different portions of the antibody are derived from different animal species, such as antibodies having a variable region derived from a murine monoclonal antibody and a human immunoglobulin constant region. Methods for producing chimeric antibodies are known in the art. See e.g., Morrison, Science 229:1202 (1985); Oi et al., BioTechniques 4:214 (1986); Gillies et al., (1989) J. Immunol. Methods 125:191-202; U.S. Pat. Nos. 5,807,715; 4,816,567; and 4,816397, which are incorporated herein by reference in their entirety. Humanized antibodies are antibody molecules from non-human species antibody that binds the desired antigen having one or more complementarity determining regions (CDRs) from the non-human species and a framework regions from a human immunoglobulin molecule. Often, framework residues in the human framework regions will be substituted with the corresponding residue from the CDR donor antibody to alter, preferably improve, antigen binding. These framework substitutions are identified by methods well known in the art, e.g., by modeling of the interactions of the CDR and framework residues to identify framework residues important for antigen binding and sequence comparison to identify unusual framework residues at particular positions. (See, e.g., Queen et al., U.S. Pat. No. 5,585,089; Riechmann et al., Nature 332:323 (1988), which are incorporated herein by reference in their entireties.) Antibodies can be humanized using a variety of techniques known in the art including, for example, CDR-grafting (EP 239,400; PCT publication WO 91/09967; U.S. Pat. Nos. 5,225,539; 5,530,101; and 5,585,089), veneering or resurfacing (EP 592,106; EP 519,596; Padlan, Molecular Immunology 28(4/5):489-498 (1991); Studnicka et al., Protein Engineering 7(6):805-814 (1994); Roguska. et al., PNAS 91:969-973 (1994)), and chain shuffling (U.S. Pat. No. 5,565,332).

[0179] Completely human antibodies are particularly desirable for therapeutic treatment of human patients. Human antibodies can be immunoglobulin sequences. See also, U.S. Pat. Nos. 4,444,887 and 4,716,111; and PCT publications WO 98/46645, WO 98/50433, WO 98/24893, WO 98/16654, WO 96/34096, WO 96/33735, and WO 91/10741; each of which is incorporated herein by reference in its entirety.

[0180] Human antibodies can also be produced using transgenic mice which are incapable of expressing functional endogenous immunoglobulins, but which can express human immunoglobulin genes. For example, the human heavy and light chain immunoglobulin gene complexes may be introduced randomly or by homologous recombination into mouse embryonic stem cells. Alternatively, the human variable region, constant region, and diversity region may be introduced into mouse embryonic stem cells in addition to the human heavy and light chain genes. The mouse heavy and light chain immunoglobulin genes may be rendered non-functional separately or simultaneously with the introduction of human immunoglobulin loci by homologous recombination. In particular, homozygous deletion of the JH region prevents endogenous antibody production. The modified embryonic stem cells are expanded and microinjected into blastocysts to produce chimeric mice. The chimeric mice are then bred to produce homozygous offspring which express human antibodies. The transgenic mice are immunized in the normal fashion with a selected antigen, e.g., all or a portion of a polypeptide of the invention. Monoclonal antibodies directed against the antigen can be obtained from the immunized, transgenic mice using conventional hybridoma technology. The human immunoglobulin transgenes harbored by the transgenic mice rearrange during B cell differentiation, and subsequently undergo class switching and somatic mutation. Thus, using such a technique, it is possible to produce therapeutically useful IgG, IgA, IgM and IgE antibodies. For an overview of this technology for producing human antibodies, see Lonberg and Huszar, Int. Rev. Immunol. 13:65-93 (1995). For a detailed discussion of this technology for producing human antibodies and human monoclonal antibodies and protocols for producing such antibodies, see, e.g., PCT publications WO 98/24893; WO 92/01047; WO 96/34096; WO 96/33735; European Patent No. 0 598 877; U.S. Pat. Nos. 5,413,923; 5,625,126; 5,633,425; 5,569,825; 5,661,016; 5,545,806; 5,814,318; 5,885,793; 5,916,771; 5,939,598; 6,075,181; and 6,114,598, which are incorporated by reference herein in their entirety. In addition, companies such as Abgenix, Inc. (Freemont, Calif.) and Genpharm (San Jose, Calif.) can be engaged to provide human antibodies directed against a selected antigen using technology similar to that described above.

[0181] Completely human antibodies which recognize a selected epitope can be generated using a technique referred to as “guided selection.” In this approach a selected non-human monoclonal antibody, e.g., a mouse antibody, is used to guide the selection of a completely human antibody recognizing the same epitope. (Jespers et al., Bio/technology 12:899-903 (1988)).

[0182] Polynucleotides Encoding Antibodies

[0183] The invention further provides polynucleotides comprising a nucleotide sequence encoding an antibody and fragments thereof. The invention also encompasses polynucleotides that hybridize under stringent or alternatively, under lower stringency hybridization conditions, e.g., as defined supra, to polynucleotides that encode an antibody, preferably, that specifically binds to a Therapeutic protein, and more preferably, an antibody that binds to a polypeptide having the amino acid sequence of a “therapeutic protein X as discosed in the “Exemplary Identifier” column of Table 1.

[0184] The polynucleotides may be obtained, and the nucleotide sequence of the polynucleotides determined, by any method known in the art. For example, if the nucleotide sequence of the antibody is known, a polynucleotide encoding the antibody may be assembled from chemically synthesized oligonucleotides (e.g., as described in Kutmeier et al., BioTechniques 17:242 (1994)), which, briefly, involves the synthesis of overlapping oligonucleotides containing portions of the sequence encoding the antibody, annealing and ligating of those oligonucleotides, and then amplification of the ligated oligonucleotides by PCR.

[0185] Alternatively, a polynucleotide encoding an antibody may be generated from nucleic acid from a suitable source. If a clone containing a nucleic acid encoding a particular antibody is not available, but the sequence of the antibody molecule is known, a nucleic acid encoding the immunoglobulin may be chemically synthesized or obtained from a suitable source (e.g., an antibody cDNA library, or a cDNA library generated from, or nucleic acid, preferably poly A+ RNA, isolated from, any tissue or cells expressing the antibody, such as hybridoma cells selected to express an antibody) by PCR amplification using synthetic primers hybridizable to the 3′ and 5′ ends of the sequence or by cloning using an oligonucleotide probe specific for the particular gene sequence to identify, e.g., a cDNA clone from a cDNA library that encodes the antibody. Amplified nucleic acids generated by PCR may then be cloned into replicable cloning vectors using any method well known in the art (See Example 60).

[0186] Once the nucleotide sequence and corresponding amino acid sequence of the antibody is determined, the nucleotide sequence of the antibody may be manipulated using methods well known in the art for the manipulation of nucleotide sequences, e.g., recombinant DNA techniques, site directed mutagenesis, PCR, etc. (see, for example, the techniques described in Sambrook et al., 1990, Molecular Cloning, A Laboratory Manual, 2d Ed., Cold Spring Harbor Laboratory, Cold Spring Harbor, NY and Ausubel et al., eds., 1998, Current Protocols in Molecular Biology, John Wiley & Sons, NY, which are both incorporated by reference herein in their entireties ), to generate antibodies having a different amino acid sequence, for example to create amino acid substitutions, deletions, and/or insertions.

[0187] In a specific embodiment, the amino acid sequence of the heavy and/or light chain variable domains may be inspected to identify the sequences of the complementarity determining regions (CDRs) by methods that are well know in the art, e.g., by comparison to known amino acid sequences of other heavy and light chain variable regions to determine the regions of sequence hypervariability. Using routine recombinant DNA techniques, one or more of the CDRs may be inserted within framework regions, e.g., into human framework regions to humanize a non-human antibody, as described supra. The framework regions may be naturally occurring or consensus framework regions, and preferably human framework regions (see, e.g., Chothia et al., J. Mol. Biol. 278: 457479 (1998) for a listing of human framework regions). Preferably, the polynucleotide generated by the combination of the framework regions and CDRs encodes an antibody that specifically binds a polypeptide of the invention. Preferably, as discussed supra, one or more amino acid substitutions may be made within the framework regions, and, preferably, the amino acid substitutions improve binding of the antibody to its antigen. Additionally, such methods may be used to make amino acid substitutions or deletions of one or more variable region cysteine residues participating in an intrachain disulfide bond to generate antibody molecules lacking one or more intrachain disulfide bonds. Other alterations to the polynucleotide are encompassed by the present invention and within the skill of the art.

[0188] In addition, techniques developed for the production of “chimeric antibodies” (Morrison et al., Proc. Natl. Acad. Sci. 81:851-855 (1984); Neuberger et al., Nature 312:604-608 (1984); Takeda et al., Nature 314:452454 (1985)) by splicing genes from a mouse antibody molecule of appropriate antigen specificity together with genes from a human antibody molecule of appropriate biological activity can be used. As described supra, a chimeric antibody is a molecule in which different portions are derived from different animal species, such as those having a variable region derived from a murine mAb and a human immunoglobulin constant region, e.g., humanized antibodies.

[0189] Alternatively, techniques described for the production of single chain antibodies (U.S. Pat. No. 4,946,778; Bird, Science 242:423-42 (1988); Huston et al., Proc. Natl. Acad. Sci. USA 85:5879-5883 (1988); and Ward et al., Nature 344:544-54 (1989)) can be adapted to produce single chain antibodies. Single chain antibodies are formed by linking the heavy and light chain fragments of the Fv region via an amino acid bridge, resulting in a single chain polypeptide. Techniques for the assembly of functional Fv fragments in E. coli may also be used (Skerra et al., Science 242:1038-1041 (1988)).

[0190] Recombinant Expression of Antibodies

[0191] Recombinant expression of an antibody, or fragment, derivative or analog thereof, (e.g., a heavy or light chain of an antibody or a single chain antibody), requires construction of an expression vector containing a polynucleotide that encodes the antibody. Once a polynucleotide encoding an antibody molecule or a heavy or light chain of an antibody, or portion thereof (preferably containing the heavy or light chain variable domain), of the invention has been obtained, the vector for the production of the antibody molecule may be produced by recombinant DNA technology using techniques well known in the art. Thus, methods for preparing a protein by expressing a polynucleotide containing an antibody encoding nucleotide sequence are described herein. Methods which are well known to those skilled in the art can be used to construct expression vectors containing antibody coding sequences and appropriate transcriptional and translational control signals. These methods include, for example, in vitro recombinant DNA techniques, synthetic techniques, and in vivo genetic recombination. The invention, thus, provides replicable vectors comprising a nucleotide sequence encoding an antibody molecule of the invention, or a heavy or light chain thereof, or a heavy or light chain variable domain, operably linked to a promoter. Such vectors may include the nucleotide sequence encoding the constant region of the antibody molecule (see, e.g., PCT Publication WO 86/05807; PCT Publication WO 89/01036; and U.S. Pat. No. 5,122,464) and the variable domain of the antibody may be cloned into such a vector for expression of the entire heavy or light chain.

[0192] The expression vector is transferred to a host cell by conventional techniques and the transfected cells are then cultured by conventional techniques to produce an antibody. Thus, the invention includes host cells containing a polynucleotide encoding an antibody of the invention, or a heavy or light chain thereof, or a single chain antibody, operably linked to a heterologous promoter. In preferred embodiments for the expression of double-chained antibodies, vectors encoding both the heavy and light chains may be co-expressed in the host cell for expression of the entire immunoglobulin molecule, as detailed below.

[0193] A variety of host-expression vector systems may be utilized to express the antibody molecules of the invention. Such host-expression systems represent vehicles by which the coding sequences of interest may be produced and subsequently purified, but also represent cells which may, when transformed or transfected with the appropriate nucleotide coding sequences, express an antibody molecule of the invention in situ. These include but are not limited to microorganisms such as bacteria (e.g., E. coli, B. subtilis) transformed with recombinant bacteriophage DNA, plasmid DNA or cosmid DNA expression vectors containing antibody coding sequences; yeast (e.g., Saccharomyces, Pichia) transformed with recombinant yeast expression vectors containing antibody coding sequences; insect cell systems infected with recombinant virus expression vectors (e.g., baculovirus) containing antibody coding sequences; plant cell systems infected with recombinant virus expression vectors (e.g., cauliflower mosaic virus, CaMV; tobacco mosaic virus, TMV) or transformed with recombinant plasmid expression vectors (e.g., Ti plasmid) containing antibody coding sequences; or mammalian cell systems (e.g., COS, CHO, BHK, 293, 3T3 cells). harboring recombinant expression constructs containing promoters derived from the genome of mammalian cells (e.g., metallothionein promoter) or from mammalian viruses (e.g., the adenovirus late promoter; the vaccinia virus 7.5K promoter). Preferably, bacterial cells such as Escherichia coli, and more preferably, eukaryotic cells, especially for the expression of whole recombinant antibody molecule, are used for the expression of a recombinant antibody molecule. For example, mammalian cells such as Chinese hamster ovary cells (CHO), in conjunction with a vector such as the major intermediate early gene promoter element from human cytomegalovirus is an effective expression system for antibodies (Foecking et al., Gene 45:101 (1986); Cockett et al., Bio/Technology 8:2 (1990).

[0194] In bacterial systems, a number of expression vectors may be advantageously selected depending upon the use intended for the antibody molecule being expressed. For example, when a large quantity of such a protein is to be produced, for the generation of pharmaceutical compositions of an antibody molecule, vectors which direct the expression of high levels of fusion protein products that are readily purified may be desirable. Such vectors include, but are not limited, to the E. coli expression vector pUR278 (Ruther et al., EMBO J. 2:1791 (1983)), in which the antibody coding sequence may be ligated individually into the vector in frame with the lac Z coding region so that a fusion protein is produced; pIN vectors (Inouye & Inouye, Nucleic Acids Res. 13:3101-3109 (1985); Van Heeke & Schuster, J. Biol. Chem. 24:5503-5509 (1989)); and the like. pGEX vectors may also be used to express foreign polypeptides as fusion proteins with glutathione S-transferase (GST). In general, such fusion proteins are soluble and can easily be purified from lysed cells by adsorption and binding to matrix glutathione-agarose beads followed by elution in the presence of free glutathione. The pGEX vectors are designed to include thrombin or factor Xa protease cleavage sites so that the cloned target gene product can be released from the GST moiety.

[0195] In an insect system, Autographa californica nuclear polyhedrosis virus (AcNPV) is used as a vector to express foreign genes. The virus grows in Spodoptera frugiperda cells. The antibody coding sequence may be cloned individually into non-essential regions (for example the polyhedrin gene) of the virus and placed under control of an AcNPV promoter (for example the polyhedrin promoter).

[0196] In mammalian host cells, a number of viral-based expression systems may be utilized. In cases where an adenovirus is used as an expression vector, the antibody coding sequence of interest may be ligated to an adenovirus transcription/translation control complex, e.g., the late promoter and tripartite leader sequence. This chimeric gene may then be inserted in the adenovirus genome by in vitro or in vivo recombination. Insertion in a non-essential region of the viral genome (e.g., region E1 or E3) will result in a recombinant virus that is viable and capable of expressing the antibody molecule in infected hosts. (e.g., see Logan & Shenk, Proc. Natl. Acad. Sci. USA 81:355-359 (1984)). Specific initiation signals may also be required for efficient translation of inserted antibody coding sequences. These signals include the ATG initiation codon and adjacent sequences. Furthermore, the initiation codon must be in phase with the reading frame of the desired coding sequence to ensure translation of the entire insert. These exogenous translational control signals and initiation codons can be of a variety of origins, both natural and synthetic. The efficiency of expression may be enhanced by the inclusion of appropriate transcription enhancer elements, transcription terminators, etc. (see Bittner et al., Methods in Enzymol. 153:51-544 (1987)).

[0197] In addition, a host cell strain may be chosen which modulates the expression of the inserted sequences, or modifies and processes the gene product in the specific fashion desired. Such modifications (e.g., glycosylation) and processing (e.g., cleavage) of protein products may be important for the function of the protein. Different host cells have characteristic and specific mechanisms for the post-translational processing and modification of proteins and gene products. Appropriate cell lines or host systems can be chosen to ensure the correct modification and processing of the foreign protein expressed. To this end, eukaryotic host cells which possess the cellular machinery for proper processing of the primary transcript, glycosylation, and phosphorylation of the gene product may be used. Such mammalian host cells include but are not limited to CHO, VERY, BHK, Hela, COS, MDCK, 293, 3T3, WI38, and in particular, breast cancer cell lines such as, for example, BT483, Hs578T, HTB2, BT20 and T47D, and normal mammary gland cell line such as, for example, CRL7030 and Hs578 Bst.

[0198] For long-term, high-yield production of recombinant proteins, stable expression is preferred. For example, cell lines which stably express the antibody molecule may be engineered. Rather than using expression vectors which contain viral origins of replication, host cells can be transformed with DNA controlled by appropriate expression control elements (e.g., promoter, enhancer, sequences, transcription terminators, polyadenylation sites, etc.), and a selectable marker. Following the introduction of the foreign DNA, engineered cells may be allowed to grow for 1-2 days in an enriched media, and then are switched to a selective media. The selectable marker in the recombinant plasmid confers resistance to the selection and allows cells to stably integrate the plasmid into their chromosomes and grow to form foci which in turn can be cloned and expanded into cell lines. This method may advantageously be used to engineer cell lines which express the antibody molecule. Such engineered cell lines may be particularly useful in screening and evaluation of compounds that interact directly or indirectly with the antibody molecule.

[0199] A number of selection systems may be used, including but not limited to the herpes simplex virus thymidine kinase (Wigler et al., Cell 11:223 (1977)), hypoxanthine-guanine phosphoribosyltransferase (Szybalska & Szybalski, Proc. Natl. Acad. Sci. USA 48:202 (1992)), and adenine phosphoribosyltransferase (Lowy et al., Cell 22:817 (1980)) genes can be employed in tk-, hgprt- or aprt-cells, respectively. Also, antimetabolite resistance can be used as the basis of selection for the following genes: dhfr, which confers resistance to methotrexate (Wigler et al., Natl. Acad. Sci. USA 77:357.(1980); O'Hare et al., Proc. Natl. Acad. Sci. USA 78:1527 (1981)); gpt, which confers resistance to mycophenolic acid (Mulligan & Berg, Proc. Natl. Acad. Sci. USA 78:2072 (1981)); neo, which confers resistance to the aminoglycoside G-418 Clinical Pharmacy 12:488-505; Wu and Wu, Biotherapy 3:87-95 (1991); Tolstoshev, Ann. Rev. Pharmacol. Toxicol. 32:573-596 (1993); Mulligan, Science 260:926-932 (1993); and Morgan and Anderson, Ann. Rev. Biochem. 62:191-217 (1993); May, 1993, TIB TECH 11(5):155-215 (1993)); and hygro, which confers resistance to hygromycin (Santerre et al., Gene 30:147 (1984). Methods commonly known in the art of recombinant DNA technology may be routinely applied to select the desired recombinant clone, and such methods are described, for example, in Ausubel et al. (eds.), Current Protocols in Molecular Biology, John Wiley & Sons, NY (1993); Kriegler, Gene Transfer and Expression, A Laboratory Manual, Stockton Press, NY (1990); and in Chapters 12 and 13, Dracopoli et al. (eds), Current Protocols in Human Genetics, John Wiley & Sons, NY (1994); Colberre-Garapin et al., J. Mol. Biol. 150:1 (1981), which are incorporated by reference herein in their entireties.

[0200] The expression levels of an antibody molecule can be increased by vector amplification (for a review, see Bebbington and Hentschel. The use of vectors based on gene amplification for the expression of cloned genes in mammalian cells in DNA cloning, Vol. 3. (Academic Press, New York, 1987)). When a marker in the vector system expressing antibody is amplifiable, increase in the level of inhibitor present in culture of host cell will increase the number of copies of the marker gene. Since the amplified region is associated with the antibody gene, production of the antibody will also increase (Crouse et al., Mol. Cell. Biol. 3:257 (1983)).

[0201] Vectors which use glutamine synthase (GS) or DHFR as the selectable markers can be amplified in the presence of the drugs methionine sulphoximine or methotrexate, respectively. An advantage of glutamine synthase based vectors are the availabilty of cell lines (e.g., the murine myeloma cell line, NSO) which are glutamine synthase negative. Glutamine synthase expression systems can also function in glutamine synthase expressing cells (e.g. Chinese Hamster Ovary (CHO) cells) by providing additional inhibitor to prevent the functioning of the endogenous gene. A glutamine synthase expression system and components thereof are detailed in PCT publications: WO87/04462; WO86/05807; WO89/01036; WO89/10404; and WO91/06657 which are incorporated in their entireties by reference herein. Additionally, glutamine synthase expression vectors that may be used according to the present invention are commercially available from suppliers, including, for example Lonza Biologics, Inc. (Portsmouth, N.H.). Expression and production of monoclonal antibodies using a GS expression system in murine myeloma cells is described in Bebbington et al., Bio/technology 10:169(1992) and in Biblia and Robinson Biotechnol. Prog. 11:1 (1995) which are incorporated in their entirities by reference herein.

[0202] The host cell may be co-transfected with two expression vectors of the invention, the first vector encoding a heavy chain derived polypeptide and the second vector encoding a light chain derived polypeptide. The two vectors may contain identical selectable markers which enable equal expression of heavy and light chain polypeptides. Alternatively, a single vector may be used which encodes, and is capable of expressing, both heavy and light chain polypeptides. In such situations, the light chain should be placed before the heavy chain to avoid an excess of toxic free heavy chain (Proudfoot, Nature 322:52 (1986); Kohler, Proc. Natl. Acad. Sci. USA 77:2197 (1980)). The coding sequences for the heavy and light chains may comprise cDNA or genomic DNA.

[0203] Once an antibody molecule of the invention has been produced by an animal, chemically synthesized, or recombinantly expressed, it may be purified by any method known in the art for purification of an immunoglobulin molecule, for example, by chromatography (e.g., ion exchange, affinity, particularly by affinity for the specific antigen after Protein A, and sizing column chromatography), centrifugation, differential solubility, or by any other standard technique for the purification of proteins. In addition, the antibodies that bind to a Therapeutic protein and that may correspond to a Therapeutic protein portion of an albumin fusion protein of the invention or fragments thereof can be fused to heterologous polypeptide sequences described herein or otherwise known in the art, to facilitate purification.

[0204] Modifications of Antibodies

[0205] Antibodies that bind a Therapeutic protein or fragments or variants can be fused to marker sequences, such as a peptide to facilitate purification. In preferred embodiments, the marker amino acid sequence is a hexa-histidine peptide, such as the tag provided in a pQE vector (QIAGEN, Inc., 9259 Eton Avenue, Chatsworth, Calif., 91311), among others, many of which are commercially available. As described in Gentz et al., Proc. Natl. Acad. Sci. USA 86:821-824 (1989), for instance, hexa-histidine provides for convenient purification of the fusion protein. Other peptide tags useful for purification include, but are not limited to, the “HA” tag, which corresponds to an epitope derived from the influenza hemagglutinin protein (Wilson et al., Cell 37:767 (1984)) and the “flag” tag.

[0206] The present invention further encompasses antibodies or fragments thereof conjugated to a diagnostic or therapeutic agent. The antibodies can be used diagnostically to, for example, monitor the development or progression of a tumor as part of a clinical testing procedure to, e.g., determine the efficacy of a given treatment regimen. Detection can be facilitated by coupling the antibody to a detectable substance. Examples of detectable substances include various enzymes, prosthetic groups, fluorescent materials, luminescent materials, bioluminescent materials, radioactive materials, positron emitting metals using various positron emission tomographies, and nonradioactive paramagnetic metal ions. The detectable substance may be coupled or conjugated either directly to the antibody (or fragment thereof) or indirectly, through an intermediate (such as, for example, a linker known in the art) using techniques known in the art. See, for example, U.S. Pat. No. 4,741,900 for metal ions which can be conjugated to antibodies for use as diagnostics according to the present invention. Examples of suitable enzymes include horseradish peroxidase, alkaline phosphatase, beta-galactosidase, or acetylcholinesterase; examples of suitable prosthetic group complexes include streptavidin/biotin and avidin/biotin; examples of suitable fluorescent materials include umbelliferone, fluorescein, fluorescein isothiocyanate, rhodamine, dichlorotriazinylamine fluorescein, dansyl chloride or phycoerythrin; an example of a luminescent material includes luminol; examples of bioluminescent materials include luciferase, luciferin, and aequorin; and examples of suitable radioactive material include 125I, 131I, 111In or 99Tc. Other examples of detectable substances have been described elsewhere herein.

[0207] Further, an antibody of the invention may be conjugated to a therapeutic moiety such as a cytotoxin, e.g., a cytostatic or cytocidal agent, a therapeutic agent or a radioactive metal ion, e.g., alpha-emitters such as, for example, 213Bi. A cytotoxin or cytotoxic agent includes any agent that is detrimental to cells. Examples include paclitaxol, cytochalasin B, gramicidin D, ethidium bromide, emetine, mitomycin, etoposide, tenoposide, vincristine, vinblastine, colchicin, doxorubicin, daunorubicin, dihydroxy anthracin dione, mitoxantrone, mithramycin, actinomycin D, 1-dehydrotestosterone, glucocorticoids, procaine, tetracaine, lidocaine, propranolol, and puromycin and analogs or homologs thereof. Therapeutic agents include, but are not limited to, antimetabolites (e.g., methotrexate, 6-mercaptopurine, 6-thioguanine, cytarabine, 5-fluorouracil decarbazine), alkylating agents (e.g., mechlorethamine, thioepa chlorambucil, melphalan, cannustine (BSNU) and lomustine (CCNU), cyclothosphamide, busulfan, dibromomannitol, streptozotocin, mitomycin C, and cis-dichlorodiamine platinum (II) (DDP) cisplatin), anthracyclines (e.g., daunorubicin (formerly daunomycin) and doxorubicin), antibiotics (e.g., dactinomycin (formerly actinomycin), bleomycin, mithramycin, and anthramycin (AMC)), and anti-mitotic agents (e.g., vincristine and vinblastine).

[0208] The conjugates of the invention can be used for modifying a given biological response, the therapeutic agent or drug moiety is not to be construed as limited to classical chemical therapeutic agents. For example, the drug moiety may be a protein or polypeptide possessing a desired biological activity. Such proteins may include, for example, a toxin such as abrin, ricin A, pseudomonas exotoxin, or diphtheria toxin; a protein such as tumor necrosis factor, alpha-interferon, B-interferon, nerve growth factor, platelet derived growth factor, tissue plasminogen activator, an apoptotic agent, e.g., TNF-alpha, TNF-beta, AIM I (See, International Publication No. WO 97/33899), AIM II (See, International Publication No. WO 97/34911), Fas Ligand (Takahashi et al., Int. Immunol., 6:1567-1574 (1994)), VEGI (See, International Publication No. WO 99/23105), a thrombotic agent or an anti-angiogenic agent, e.g., angiostatin or endostatin; or, biological response modifiers such as, for example, lymphokines, interleukin-1 (“IL-1”), interleukin-2 (“IL-2”), interleukin-6 (“IL-6”), granulocyte macrophage colony stimulating factor (“GM-CSF”), granulocyte colony stimulating factor (“G-CSF”), or other growth factors.

[0209] Antibodies may also be attached to solid supports, which are particularly useful for immunoassays or purification of the target antigen. Such solid supports include, but are not limited to, glass, cellulose, polyacrylamide, nylon, polystyrene, polyvinyl chloride or polypropylene.

[0210] Techniques for conjugating such therapeutic moiety to antibodies are well known. See, for example, Amon et al., “Monoclonal Antibodies For Immunotargeting Of Drugs In Cancer Therapy”, in Monoclonal Antibodies And Cancer Therapy, Reisfeld et al. (eds.), pp. 243-56 (Alan R. Liss, Inc. 1985); Hellstrom et al., “Antibodies For Drug Delivery”, in Controlled Drug Delivery (2nd Ed.) Robinson et al. (eds.), pp. 623-53 (Marcel Dekker, Inc. 1987); Thorpe, “Antibody Carriers Of Cytotoxic Agents In Cancer Therapy: A Review”, in Monoclonal Antibodies '84: Biological And Clinical Applications, Pinchera et al. (eds.), pp. 475-506 (1985); “Analysis, Results, And Future Prospective Of The Therapeutic Use Of Radiolabeled Antibody In Cancer Therapy”, in Monoclonal Antibodies For Cancer Detection And Therapy, Baldwin et al. (eds.), pp. 303-16 (Academic Press 1985), and Thorpe et al., “The Preparation And Cytotoxic Properties Of Antibody-Toxin Conjugates”, Immunol. Rev. 62:119-58 (1982).

[0211] Alternatively, an antibody can be conjugated to a second antibody to form an antibody heteroconjugate as described by Segal in U.S. Pat. No. 4,676,980, which is incorporated herein by reference in its entirety.

[0212] An antibody, with or without a therapeutic moiety conjugated to it, administered alone or in combination with cytotoxic factor(s) and/or cytokine(s) can be used as a therapeutic.

[0213] Antibody-Albumin Fusion

[0214] Antibodies that bind to a Therapeutic protein and that may correspond to a Therapeutic protein portion of an albumin fusion protein of the invention include, but are not limited to, antibodies that bind a Therapeutic protein disclosed in “Therapeutic Protein X” column of Table 1, or a fragment or variant thereof.

[0215] In specific embodiments, the fragment or variant of an antibody that immunospecifcally binds a Therapeutic protein and that corresponds to a Therapeutic protein portion of an albumin fusion protein comprises, or alternatively consists of, the VH domain. In other embodiments, the fragment or variant of an antibody that immunospecifcally binds a Therapeutic protein and that corresponds to a Therapeutic protein portion of an albumin fusion protein comprises, or alternatively consists of, one, two or three VH CDRs. In other embodiments, the fragment or variant of an antibody that immunospecifcally binds a Therapeutic protein and that corresponds to a Therapeutic protein portion of an albumin fusion protein comprises, or alternatively consists of, the VH CDRI. In other embodiments, the fragment or variant of an antibody that immunospecifcally binds a Therapeutic protein and that corresponds to a Therapeutic protein portion of an albumin fusion protein comprises, or alternatively consists of, the VH CDR2. In other embodiments, the fragment or variant of an antibody that immunospecifcally binds a Therapeutic protein and that corresponds to a Therapeutic protein portion of an albumin fusion protein comprises, or alternatively consists of, the VH CDR3.

[0216] In specific embodiments, the fragment or variant of an antibody that immunospecifcally binds a Therapeutic protein and that corresponds to a Therapeutic protein portion of an albumin fusion protein comprises, or alternatively consists of, the VL domain. In other embodiments, the fragment or variant of an antibody that immunospecifcally binds a Therapeutic protein and that corresponds to a Therapeutic protein portion of an albumin fusion protein comprises, or alternatively consists of, one, two or three VL CDRs. In other embodiments, the fragment or variant of an antibody that immunospecifcally binds a Therapeutic protein and that corresponds to a Therapeutic protein portion of an albumin fusion protein comprises, or alternatively consists of, the VL CDR1. In other embodiments, the fragment or variant of an antibody that immunospecifcally binds a Therapeutic protein and that corresponds to a Therapeutic protein portion of an albumin fusion protein comprises, or alternatively consists of, the VL CDR2. In other embodiments, the fragment or variant of an antibody that immunospecifcally binds a Therapeutic protein and that corresponds to a Therapeutic protein portion of an albumin fusion protein comprises, or alternatively consists of, the VL CDR3.

[0217] In other embodiments, the fragment or variant of an antibody that immunospecifcally binds a Therapeutic protein and that corresponds to a Therapeutic protein portion of an albumin fusion protein comprises, or alternatively consists of, one, two, three, four, five, or six VH and/or VL CDRs.

[0218] In preferred embodiments, the fragment or variant of an antibody that immunospecifcaly binds a Therapeutic protein and that corresponds to a Therapeutic protein portion of an albumin fusion protein comprises, or alternatively consists of, an scFv comprising the VH domain of the Therapeutic antibody, linked to the VL domain of the therapeutic antibody by a peptide linker such as (Gly₄Ser)₃ (SEQ ID NO:36).

[0219] Immunophenotyping

[0220] The antibodies of the invention or albumin fusion proteins of the invention comprising at least a fragment or variant of an antibody that binds a Therapeutic protein (or fragment or variant thereof) may be utilized for immunophenotyping of cell lines and biological samples. Therapeutic proteins of the present invention may be useful as cell-specific markers, or more specifically as cellular markers that are differentially expressed at various stages of differentiation and/or maturation of particular cell types. Monoclonal antibodies (or albumin fusion proteins comprsing at least a fragment or variant of an antibody that binds a Therapeutic protein) directed against a specific epitope, or combination of epitopes, will allow for the screening of cellular populations expressing the marker. Various techniques can be utilized using monoclonal antibodies (or albumin fusion proteins comprising at least a fragment or variant of an antibody that binds a Therapeutic protein) to screen for cellular populations expressing the marker(s), and include magnetic separation using antibody-coated magnetic beads, “panning” with antibody attached to a solid matrix (i.e., plate), and flow cytometry (See, e.g., U.S. Pat. No. 5,985,660; and Morrison et al., Cell, 96:737-49 (1999)).

[0221] These techniques allow for the screening of particular populations of cells, such as might be found with hematological malignancies (i.e. minimal residual disease (MRD) in acute leukemic patients) and “non-self” cells in transplantations to prevent Graft-versus-Host Disease (GVHD). Alternatively, these techniques allow for the screening of hematopoietic stem and progenitor cells capable of undergoing proliferation and/or differentiation, as might be found in human umbilical cord blood.

[0222] Characterizing Antibodies that Bind a Therapeutic Protein and Albumin Fusion Proteins Comprising a Fragment or Variant of an Antibody that Binds a Therapeutic Protein

[0223] The antibodies of the invention or albumin fusion proteins of the invention comprising at least a fragment or variant of an antibody that binds a Therapeutic protein (or fragment or variant thereof) may be characterized in a variety of ways. In particular, Albumin fusion proteins of the invention comprising at least a fragment or variant of an antibody that binds a Therapeutic protein may be assayed for the ability to specifically bind to the same antigens specifically bound by the antibody that binds a Therapeutic protein corresponding to the antibody that binds a Therapeutic protein portion of the albumin fusion protein using techniques described herein or routinely modifying techniques known in the art.

[0224] Assays for the ability of the antibodies of the invention or albumin fusion proteins of the invention comprising at least a fragment or variant of an antibody that binds a Therapeutic protein (or fragment or variant thereof) to (specifically) bind a specific protein or epitope may be performed in solution (e.g., Houghten, Bio/Techniques 13:412421(1992)), on beads (e.g., Lam, Nature 354:82-84 (1991)), on chips (e.g., Fodor, Nature 364:555-556 (1993)), on bacteria (e.g., U.S. Pat. No. 5,223,409), on spores (e.g., U.S. Pat. Nos. 5,571,698; 5,403,484; and 5,223,409), on plasmids (e.g., Cull et al., Proc. Natl. Acad. Sci. USA 89:1865-1869 (1992)) or on phage (e.g., Scott and Smith, Science 249:386-390 (1990); Devlin, Science 249:404-406 (1990); Cwirla et al., Proc. Natl. Acad. Sci. USA 87:6378-6382 (1990); and Felici, J. Mol. Biol. 222:301-310 (1991)) (each of these references is incorporated herein in its entirety by reference). The antibodies of the invention or albumin fusion proteins of the invention comprising at least a fragment or variant of an antibody that binds a Therapeutic protein (or fragment or variant thereof) may also be assayed for their specificity and affinity for a specific protein or epitope using or routinely modifying techniques described herein or otherwise known in the art.

[0225] The albumin fusion proteins of the invention comprising at least a fragment or variant of an antibody that binds a Therapeutic protein may be assayed for cross-reactivity with other antigens (e.g., molecules that have sequence/structure conservation with the molecule(s) specifically bound by the antibody that binds a Therapeutic protein (or fragment or variant thereof) corresponding to the Therapeutic protein portion of the albumin fusion protein of the invention) by any method known in the art.

[0226] Immunoassays which can be used to analyze (immunospecific) binding and cross-reactivity include, but are not limited to, competitive and non-competitive assay systems using techniques such as western blots, radioimmunoassays, ELISA (enzyme linked immunosorbent assay), “sandwich” immunoassays, immunoprecipitation assays, precipitin reactions, gel diffusion precipitin reactions, immunodiffusion assays, agglutination assays, complement-fixation assays, immunoradiometric assays, fluorescent immunoassays, and protein A immunoassays, to name but a few. Such assays are routine and well known in the art (see, e.g., Ausubel et al, eds, 1994, Current Protocols in Molecular Biology, Vol. 1, John Wiley & Sons, Inc., New York, which is incorporated by reference herein in its entirety). Exemplary immunoassays are described briefly below (but are not intended by way of limitation).

[0227] Immunoprecipitation protocols generally comprise lysing a population of cells in a lysis buffer such as RIPA buffer (1% NP-40 or Triton X-100, 1% sodium deoxycholate, 0.1% SDS, 0.15 M NaCl, 0.01 M sodium phosphate at pH 7.2, 1% Trasylol) supplemented with protein phosphatase and/or protease inhibitors (e.g., EDTA, PMSF, aprotinin, sodium vanadate), adding an antibody of the invention or albumin fusion protein of the invention comprising at least a fragment or variant of an antibody that binds a Therapeutic protein (or fragment or variant thereof) to the cell lysate, incubating for a period of time (e.g., 1 to 4 hours) at 40 degrees C., adding protein A and/or protein G sepharose beads (or beads coated with an appropriate anti-iditoypic antibody or anti-albumin antibody in the case when an albumin fusion protein comprising at least a fragment or variant of a Therapeutic antibody) to the cell lysate, incubating for about an hour or more at 40 degrees C., washing the beads in lysis buffer and resuspending the beads in SDS/sample buffer. The ability of the antibody or albumin fusion protein of the invention to immunoprecipitate a particular antigen can be assessed by, e.g., western blot analysis. One of skill in the art would be knowledgeable as to the parameters that can be modified to increase the binding of the antibody or albumin fusion protein to an antigen and decrease the background (e.g., pre-clearing the cell lysate with sepharose beads). For further discussion regarding immunoprecipitation protocols see, e.g., Ausubel et al, eds, 1994, Current Protocols in Molecular Biology, Vol. 1, John Wiley & Sons, Inc., New York at 10.16.1.

[0228] Western blot analysis generally comprises preparing protein samples, electrophoresis of the protein samples in a polyacrylamide gel (e.g., 8%-20% SDS-PAGE depending on the molecular weight of the antigen), transferring the protein sample from the polyacrylamide gel to a membrane such as nitrocellulose, PVDF or nylon, blocking the membrane in blocking solution (e.g., PBS with 3% BSA or non-fat milk), washing the membrane in washing buffer (e.g., PBS-Tween 20), applying the antibody or albumin fusion protein of the invention (diluted in blocking buffer) to the membrane, washing the membrane in washing buffer, applying a secondary antibody (which recognizes the albumin fusion protein, e.g., an anti-human serum albumin antibody) conjugated to an enzymatic substrate (e.g., horseradish peroxidase or alkaline phosphatase) or radioactive molecule (e.g., ³²P or ¹²⁵I) diluted in blocking buffer, washing the membrane in wash buffer, and detecting the presence of the antigen. One of skill in the art would be knowledgeable as to the parameters that can be modified to increase the signal detected and to reduce the background noise. For further discussion regarding western blot protocols see, e.g., Ausubel et al, eds, 1994, Current Protocols in Molecular Biology, Vol. 1, John Wiley & Sons, Inc., New York at 10.8.1.

[0229] ELISAs comprise preparing antigen, coating the well of a 96-well microtiter plate with the antigen, washing away antigen that did not bind the wells, adding the antibody or albumin fusion protein (comprising at least a fragment or variant of an antibody that binds a Therapeutic protein) of the invention conjugated to a detectable compound such as an enzymatic substrate (e.g., horseradish peroxidase or alkaline phosphatase) to the wells and incubating for a period of time, washing away unbound or non-specifically bound albumin fusion proteins, and detecting the presence of the antibody or albumin fusion proteins specifically bound to the antigen coating the well. In ELISAs the antibody or albumin fusion protein does not have to be conjugated to a detectable compound; instead, a second antibody (which recognizes the antibody or albumin fusion protein, respectively) conjugated to a detectable compound may be added to the well. Further, instead of coating the well with the antigen, antibody or the albumin fusion protein may be coated to the well. In this case, the detectable molecule could be the antigen conjugated to a detectable compound such as an enzymatic substrate (e.g., horseradish peroxidase or alkaline phosphatase). One of skill in the art would be knowledgeable as to the parameters that can be modified to increase the signal detected as well as other variations of ELISAs known in the art. For further discussion regarding ELISAs see, e.g., Ausubel et al, eds, 1994, Current Protocols in Molecular Biology, Vol. 1, John Wiley &. Sons, Inc., New York at 11.2.1.

[0230] The binding affinity of an albumin fusion protein to a protein, antigen, or epitope and the off-rate of an antibody- or albumin fusion protein-protein/antigen/epitope interaction can be determined by competitive binding assays. One example of a competitive binding assay is a radioimmunoassay comprising the incubation of labeled antigen (e.g., ³H or ¹²⁵I) with the antibody or albumin fusion protein of the invention in the presence of increasing amounts of unlabeled antigen, and the detection of the antibody bound to the labeled antigen. The affinity of the antibody or albumin fusion protein of the present invention for a specific protein, antigen, or epitope and the binding off-rates can be determined from the data by Scatchard plot analysis. Competition with a second protein that binds the same protein, antigen or epitope as the antibody or albumin fusion protein, can also be determined using radioimmunoassays. In this case, the protein, antigen or epitope is incubated with an antibody or albumin fusion protein of the present invention conjugated to a labeled compound (e.g., ³H or ¹²⁵I in the presence of increasing amounts of an unlabeled second protein that binds the same protein, antigen, or epuitope as the albumin fusion protein of the invention.

[0231] In a preferred embodiment, BIAcore kinetic analysis is used to determine the binding on and off rates of antibody or albumin fusion proteins of the invention to a protein, antigen or epitope. BIAcore kinetic analysis comprises analyzing the binding and dissociation of antibodies, albumin fusion proteins, or specific polypeptides, antigens or epitopes from chips with immobilized specific polypeptides, antigens or epitopes, antibodies or albumin fusion proteins, respectively, on their surface.

[0232] Therapeutic Uses

[0233] The present invention is further directed to antibody-based therapies which involve administering antibodies of the invention or albumin fusion proteins of the invention comprising at least a fragment or variant of an antibody that binds a Therapeutic protein to an animal, preferably a mammal, and most preferably a human, patient for treating one or more of the disclosed diseases, disorders, or conditions. Therapeutic compounds of the invention include, but are not limited to, antibodies of the invention (including fragments, analogs and derivatives thereof as described herein), nucleic acids encoding antibodies of the invention (including fragments, analogs and derivatives thereof and anti-idiotypic antibodies as described herein), albumin fusion proteins of the invention comprising at least a fragment or variant of an antibody that binds a Therapeutic protein, and nucleic acids encoding such albumin fusion proteins. The antibodies of the invention or albumin fusion proteins of the invention comprising at least a fragment or variant of an antibody that binds a Therapeutic protein can be used to treat, inhibit or prevent diseases, disorders or conditions associated with aberrant expression and/or activity of a Therapeutic protein, including, but not limited to, any one or more of the diseases, disorders, or conditions described herein. The treatment and/or prevention of diseases, disorders, or conditions associated with aberrant expression and/or activity of a Therapeutic protein includes, but is not limited to, alleviating symptoms associated with those diseases, disorders or conditions. Antibodies of the invention or albumin fusion proteins of the invention comprising at least a fragment or variant of an antibody that binds a Therapeutic protein may be provided in pharmaceutically acceptable compositions as known in the art or as described herein.

[0234] In a specific and preferred embodiment, the present invention is directed to antibody-based therapies which involve administering antibodies of the invention or albumin fusion proteins of the invention comprising at least a fragment or variant of an antibody that binds a Therapeutic protein to an animal, preferably a mammal, and most preferably a human, patient for treating one or more diseases, disorders, or conditions, including but not limited to: neural disorders, immune system disorders, muscular disorders, reproductive disorders, gastrointestinal disorders, pulmonary disorders, cardiovascular disorders, renal disorders, proliferative disorders, and/or cancerous diseases and conditions, and/or as described elsewhere herein. Therapeutic compounds of the invention include, but are not limited to, antibodies of the invention (e.g., antibodies directed to the full length protein expressed on the cell surface of a mammalian cell; antibodies directed to an epitope of a Therapeutic protein and nucleic acids encoding antibodies of the invention (including fragments, analogs and derivatives thereof and anti-idiotypic antibodies as described herein). The antibodies of the invention can be used to treat, inhibit or prevent diseases, disorders or conditions associated with aberrant expression and/or activity of a Therapeutic protein, including, but not limited to, any one or more of the diseases, disorders, or conditions described herein. The treatment and/or prevention of diseases, disorders, or conditions associated with aberrant expression and/or activity of a Therapeutic protein includes, but is not limited to, alleviating symptoms associated with those diseases, disorders or conditions. Antibodies of the invention or albumin fusion proteins of the invention comprising at least a fragment or variant of an antibody that binds a Therapeutic protein may be provided in pharmaceutically acceptable compositions as known in the art or as described herein.

[0235] A summary of the ways in which the antibodies of the invention or albumin fusion proteins of the invention comprising at least a fragment or variant of an antibody that binds a Therapeutic protein may be used therapeutically includes binding Therapeutic proteins locally or systemically in the body or by direct cytotoxicity of the antibody, e.g. as mediated by complement (CDC) or by effector cells (ADCC). Some of these approaches are described in more detail below. Armed with the teachings provided herein, one of ordinary skill in the art will know how to use the antibodies of the invention or albumin fusion proteins of the invention comprising at least a fragment or variant of an antibody that binds a Therapeutic protein for diagnostic, monitoring or therapeutic purposes without undue experimentation.

[0236] The antibodies of the invention or albumin fusion proteins of the invention comprising at least a fragment or variant of an antibody that binds a Therapeutic protein may be advantageously utilized in combination with other monoclonal or chimeric antibodies, or with lymphokines or hematopoietic growth factors (such as, e.g., IL-2, IL-3 and IL-7), for example, which serve to increase the number or activity of effector cells which interact with the antibodies.

[0237] The antibodies of the invention or albumin fusion proteins of the invention comprising at least a fragment or variant of an antibody that binds a Therapeutic protein may be administered alone or in combination with other types of treatments (e.g., radiation therapy, chemotherapy, hormonal therapy, immunotherapy and anti-tumor agents). Generally, administration of products of a species origin or species reactivity (in the case of antibodies) that is the same species as that of the patient is preferred. Thus, in a preferred embodiment, human antibodies, fragments derivatives, analogs, or nucleic acids, are administered to a human patient for therapy or prophylaxis.

[0238] It is preferred to use high affinity and/or potent in vivo inhibiting and/or neutralizing antibodies against Therapeutic proteins, fragments or regions thereof, (or the albumin fusion protein correlate of such an antibody) for both immunoassays directed to and therapy of disorders related to polynucleotides or polypeptides, including fragments thereof, of the present invention. Such antibodies, fragments, or regions, will preferably have an affinity for polynucleotides or polypeptides of the invention, including fragments thereof. Preferred binding affinities include dissociation constants or Kd's less than 5×10⁻² M, 10⁻² M, 5×10⁻³ M, 10⁻³ M, 5×10⁻⁴ M, 10⁻⁴ M. More preferred binding affinities include those with a dissociation constant or Kd less than 5×10⁻⁵ M, 10⁻⁵ M, 5×10⁻⁶ M, 10⁻⁶M, 5×10⁻⁷ M, 10⁷ M, 5×10⁻⁸ M or 10⁻⁸ M. Even more preferred binding affinities include those with a dissociation constant or Kd less than 5×10⁻⁹ M, 10⁻⁹ M, 5×10⁻¹⁰ M, 10⁻¹⁰ M, 5×10⁻¹¹ M, 10⁻¹¹ M, 5×10⁻¹² M, ¹⁰⁻¹² M, 5×10⁻¹³ M, 10⁻¹³ M, 5×10⁻¹⁴ M, 10⁻¹⁴ M, 5×10⁻¹⁵ M, or 10⁻¹⁵ M.

[0239] Gene Therapy

[0240] In a specific embodiment, nucleic acids comprising sequences encoding antibodies that bind therapeutic proteins or albumin fusion proteins comprising at least a fragment or varaint of an antibody that binds a Therapeutic protein are administered to treat, inhibit or prevent a disease or disorder associated with aberrant expression and/or activity of a Therapeutic protein, by way of gene therapy. Gene therapy refers to therapy performed by the administration to a subject of an expressed or expressible nucleic acid. In this embodiment of the invention, the nucleic acids produce their encoded protein that mediates a therapeutic effect.

[0241] Any of the methods for gene therapy available in the art can be used according to the present invention. Exemplary methods are described in more detail elsewhere in this application.

[0242] Demonstration of Therapeutic or Prophylactic Activity

[0243] The compounds or pharmaceutical compositions of the invention are preferably tested in vitro, and then in vivo for the desired therapeutic or prophylactic activity, prior to use in humans. For example, in vitro assays to demonstrate the therapeutic or prophylactic utility of a compound or pharmaceutical composition include, the effect of a compound on a cell line or a patient tissue sample. The effect of the compound or composition on the cell line and/or tissue sample can be determined utilizing techniques known to those of skill in the art including, but not limited to, rosette formation assays and cell lysis assays. In accordance with the invention, in vitro assays which can be used to determine whether administration of a specific compound is indicated, include in vitro cell culture assays in which a patient tissue sample is grown in culture, and exposed to or otherwise administered a compound, and the effect of such compound upon the tissue sample is observed.

[0244] Therapeutic/Prophylactic Administration and Composition

[0245] The invention provides methods of treatment, inhibition and prophylaxis by administration to a subject of an effective amount of a compound or pharmaceutical composition of the invention, preferably an antibody. In a preferred embodiment, the compound is substantially purified (e.g., substantially free from substances that limit its effect or produce undesired side-effects). The subject is preferably an animal, including but not limited to animals such as cows, pigs, horses, chickens, cats, dogs, etc., and is preferably a mammal, and most preferably human.

[0246] Formulations and methods of administration that can be employed when the compound comprises a nucleic acid or an immunoglobulin are described above; additional appropriate formulations and routes of administration can be selected from among those described herein below.

[0247] Various delivery systems are known and can be used to administer a compound of the invention, e.g., encapsulation in liposomes, microparticles, microcapsules, recombinant cells capable of expressing the compound, receptor-mediated endocytosis (see, e.g., Wu and Wu, J. Biol. Chem. 262:4429-4432 (1987)), construction of a nucleic acid as part of a retroviral or other vector, etc. Methods of introduction include but are not limited to intradermal, intramuscular, intraperitoneal, intravenous, subcutaneous, intranasal, epidural, and oral routes. The compounds or compositions may be administered by any convenient route, for example by infusion or bolus injection, by absorption through epithelial or mucocutaneous linings (e.g., oral mucosa, rectal and intestinal mucosa, etc.) and may be administered together with other biologically active agents. Administration can be systemic or local. In addition, it may be desirable to introduce the pharmaceutical compounds or compositions of the invention into the central nervous system by any suitable route, including intraventricular and intrathecal injection; intraventricular injection may be facilitated by an intraventricular catheter, for example, attached to a reservoir, such as an Ommaya reservoir. Pulmonary administration can also be employed, e.g., by use of an inhaler or nebulizer, and formulation with an aerosolizing agent.

[0248] In a specific embodiment, it may be desirable to administer the pharmaceutical compounds or compositions of the invention locally to the area in need of treatment; this may be achieved by, for example, and not by way of limitation, local infusion during surgery, topical application, e.g., in conjunction with a wound dressing after surgery, by injection, by means of a catheter, by means of a suppository, or by means of an implant, said implant being of a porous, non-porous, or gelatinous material, including membranes, such as sialastic membranes, or fibers. Preferably, when administering a protein, including an antibody, of the invention, care must be taken to use materials to which the protein does not absorb.

[0249] In another embodiment, the compound or composition can be delivered in a vesicle, in particular a liposome (see Langer, Science 249:1527-1533 (1990); Treat et al., in Liposomes in the Therapy of Infectious Disease and Cancer, Lopez-Berestein and Fidler (eds.), Liss, New York, pp. 353- 365 (1989); Lopez-Berestein, ibid., pp. 317-327; see generally ibid.)

[0250] In yet another embodiment, the compound or composition can be delivered in a controlled release system. In one embodiment, a pump may be used (see Langer, supra; Sefton, CRC Crit. Ref. Biomed. Eng. 14:201 (1987); Buchwald et al., Surgery 88:507 (1980); Saudek et al., N. Engl. J. Med. 321:574 (1989)). In another embodiment, polymeric materials can be used (see Medical Applications of Controlled Release, Langer and Wise (eds.), CRC Pres., Boca Raton, Fla. (1974); Controlled Drug Bioavailability, Drug Product Design and Performance, Smolen and Ball (eds.), Wiley, New York (1984); Ranger and Peppas, J., Macromol. Sci. Rev. Macromol. Chem. 23:61 (1983); see also Levy et al., Science 228:190 (1985); During et al., Ann. Neurol. 25:351 (1989); Howard et al., J. Neurosurg. 71:105 (1989)). In yet another embodiment, a controlled release system can be placed in proximity of the therapeutic target, e.g., the brain, thus requiring only a fraction of the systemic dose (see, e.g., Goodson, in Medical Applications of Controlled Release, supra, vol. 2, pp. 115-138 (1984)).

[0251] Other controlled release systems are discussed in the review by Langer (Science 249:1527-1533 (1990)).

[0252] In a specific embodiment where the compound of the invention is a nucleic acid encoding a protein, the nucleic acid can be administered in vivo to promote expression of its encoded protein, by constructing it as part of an appropriate nucleic acid expression vector and administering it so that it becomes intracellular, e.g., by use of a retroviral vector (see U.S. Pat. No. 4,980,286), or by direct injection, or by use of microparticle bombardment (e.g., a gene gun; Biolistic, Dupont), or coating with lipids or cell-surface receptors or transfecting agents, or by administering it in linkage to a homeobox-like peptide which is known to enter the nucleus (see e.g., Joliot et al., Proc. Natl. Acad. Sci. USA 88:1864-1868 (1991)), etc. Alternatively, a nucleic acid can be introduced intracellularly and incorporated within host cell DNA for expression, by homologous recombination.

[0253] The present invention also provides pharmaceutical compositions. Such compositions comprise a therapeutically effective amount of a compound, and a pharmaceutically acceptable carrier. In a specific embodiment, the term “pharmaceutically acceptable” means approved by a regulatory agency of the Federal or a state government or listed in the U.S. Pharmacopeia or other generally recognized pharmacopeia for use in animals, and more particularly in humans. The term “carrier” refers to a diluent, adjuvant, excipient, or vehicle with which the therapeutic is administered. Such pharmaceutical carriers can be sterile liquids, such as water and oils, including those of petroleum, animal, vegetable or synthetic origin, such as peanut oil, soybean oil, mineral oil, sesame oil and the like. Water is a preferred carrier when the pharmaceutical composition is administered intravenously. Saline solutions and aqueous dextrose and glycerol solutions can also be employed as liquid carriers, particularly for injectable solutions. Suitable pharmaceutical excipients include starch, glucose, lactose, sucrose, gelatin, malt, rice, flour, chalk, silica gel, sodium stearate, glycerol monostearate, talc, sodium chloride, dried skim milk, glycerol, propylene, glycol, water, ethanol and the like. The composition, if desired, can also contain minor amounts of wetting or emulsifying agents, or pH buffering agents. These compositions can take the form of solutions, suspensions, emulsion, tablets, pills, capsules, powders, sustained-release formulations and the like. The composition can be formulated as a suppository, with traditional binders and carriers such as triglycerides. Oral formulation can include standard carriers such as pharmaceutical grades of mannitol, lactose, starch, magnesium stearate, sodium saccharine, cellulose, magnesium carbonate, etc. Examples of suitable pharmaceutical carriers are described in “Remington's Pharmaceutical Sciences” by E. W. Martin. Such compositions will contain a therapeutically effective amount of the compound, preferably in purified form, together with a suitable amount of carrier so as to provide the form for proper administration to the patient. The formulation should suit the mode of administration.

[0254] In a preferred embodiment, the composition is formulated in accordance with routine procedures as a pharmaceutical composition adapted for intravenous administration to human beings. Typically, compositions for intravenous administration are solutions in sterile isotonic aqueous buffer. Where necessary, the composition may also include a solubilizing agent and a local anesthetic such as lignocaine to ease pain at the site of the injection. Generally, the ingredients are supplied either separately or mixed together in unit dosage form, for example, as a dry lyophilized powder or water free concentrate in a hermetically sealed container such as an ampoule or sachette indicating the quantity of active agent. Where the composition is to be administered by infusion, it can be dispensed with an infusion bottle containing sterile pharmaceutical grade water or saline. Where the composition is administered by injection, an ampoule of sterile water for injection or saline can be provided so that the ingredients may be mixed prior to administration.

[0255] The compounds of the invention can be formulated as neutral or salt forms. Pharmaceutically acceptable salts include those formed with anions such as those derived from hydrochloric, phosphoric, acetic, oxalic, tartaric acids, etc., and those formed with cations such as those derived from sodium, potassium, ammonium, calcium, ferric hydroxides, isopropylamine, triethylamine, 2-ethylamino ethanol, histidine, procaine, etc.

[0256] The amount of the compound of the invention which will be effective in the treatment, inhibition and prevention of a disease or disorder associated with aberrant expression and/or activity of a Therapeutic protein can be determined by standard clinical techniques. In addition, in vitro assays may optionally be employed to help identify optimal dosage ranges. The precise dose to be employed in the formulation will also depend on the route of administration, and the seriousness of the disease or disorder, and should be decided according to the judgment of the practitioner and each patient's circumstances. Effective doses may be extrapolated from dose-response curves derived from in vitro or animal model test systems.

[0257] For antibodies, the dosage administered to a patient is typically 0.1 mg/kg to 100 mg/kg of the patient's body weight. Preferably, the dosage administered to a patient is between 0.1 mg/kg and 20 mg/kg of the patient's body weight, more preferably 1 mg/kg to 10 mg/kg of the patient's body weight. Generally, human antibodies have a longer half-life within the human body than antibodies from other species due to the immune response to the foreign polypeptides. Thus, lower dosages of human antibodies and less frequent administration is often possible. Further, the dosage and frequency of administration of antibodies of the invention may be reduced by enhancing uptake and tissue penetration (e.g., into the brain) of the antibodies by modifications such as, for example, lipidation.

[0258] Diagnosis and Imaging

[0259] Labeled antibodies and derivatives and analogs thereof that bind a Therapeutic protein (or fragment or variant thereof) (including albumin fusion proteins comprising at least a fragment or variant of an antibody that binds a Therapeutic protein), can be used for diagnostic purposes to detect, diagnose, or monitor diseases, disorders, and/or conditions associated with the aberrant expression and/or activity of Therapeutic protein. The invention provides for the detection of aberrant expression of a Therapeutic protein, comprising (a) assaying the expression of the Therapeutic protein in cells or body fluid of an individual using one or more antibodies specific to the polypeptide interest and (b) comparing the level of gene expression with a standard gene expression level, whereby an increase or decrease in the assayed Therapeutic protein expression level compared to the standard expression level is indicative of aberrant expression.

[0260] The invention provides a diagnostic assay for diagnosing a disorder, comprising (a) assaying the expression of the Therapeutic protein in cells or body fluid of an individual using one or more antibodies specific to the Therapeutic protein or albumin fusion proteins comprising at least a fragment of variant of an antibody specific to a Therapeutic protein, and (b) comparing the level of gene expression with a standard gene expression level, whereby an increase or decrease in the assayed Therapeutic protein gene expression level compared to the standard expression level is indicative of a particular disorder. With respect to cancer, the presence of a relatively high amount of transcript in biopsied tissue from an individual may indicate a predisposition for the development of the disease, or may provide a means for detecting the disease prior to the appearance of actual clinical symptoms. A more definitive diagnosis of this type may allow health professionals to employ preventative measures or aggressive treatment earlier thereby preventing the development or further progression of the cancer.

[0261] Antibodies of the invention or albumin fusion proteins comprising at least a fragment of variant of an antibody specific to a Therapeutic protein can be used to assay protein levels in a biological sample using classical immunohistological methods known to those of skill in the art (e.g., see Jalkanen et al., J. Cell. Biol. 101:976-985 (1985); Jalkanen et al., J. Cell. Biol. 105:3087-3096 (1987)). Other antibody-based methods useful for detecting protein gene expression include immunoassays, such as the enzyme linked immunosorbent assay (ELISA) and the radioimmunoassay (RIA). Suitable antibody assay labels are known in the art and include enzyme labels, such as, glucose oxidase; radioisotopes, such as iodine (125I, 121I), carbon (14C), sulfur (35S), tritium (3H), indium (112In), and technetium (99Tc); luminescent labels, such as luminol; and fluorescent labels, such as fluorescein and rhodamine, and biotin.

[0262] One facet of the invention is the detection and diagnosis of a disease or disorder associated with aberrant expression of a Therapeutic protein in an animal, preferably a mammal and most preferably a human. In one embodiment, diagnosis comprises: a) administering (for example, parenterally, subcutaneously, or intraperitoneally) to a subject an effective amount of a labeled molecule which specifically binds to the polypeptide of interest; b) waiting for a time interval following the administering for permitting the labeled molecule to preferentially concentrate at sites in the subject where the Therapeutic protein is expressed (and for unbound labeled molecule to be cleared to background level); c) determining background level; and d) detecting the labeled molecule in the subject, such that detection of labeled molecule above the background level indicates that the subject has a particular disease or disorder associated with aberrant expression of the therapeutic protein. Background level can be determined by various methods including, comparing the amount of labeled molecule detected to a standard value previously determined for a particular system.

[0263] It will be understood in the art that the size of the subject and the imaging system used will determine the quantity of imaging moiety needed to produce diagnostic images. In the case of a radioisotope moiety, for a human subject, the quantity of radioactivity injected will normally range from about 5 to 20 millicuries of 99mTc. The labeled antibody,antibody fragment, or albumin fusion protein comprising at least a fragement or variant of an antibody that binds a Therapeutic protein will then preferentially accumulate at the location of cells which contain the specific Therapeutic protein. In vivo tumor imaging is described in S. W. Burchiel et al., “Immunopharmacokinetics of Radiolabeled Antibodies and Their Fragments.” (Chapter 13 in Tumor Imaging: The Radiochemical Detection of Cancer, S. W. Burchiel and B. A. Rhodes, eds., Masson Publishing Inc. (1982)).

[0264] Depending on several variables, including the type of label used and the mode of administration, the time interval following the administration for permitting the labeled molecule to preferentially concentrate at sites in the subject and for unbound labeled molecule to be cleared to background level is 6 to 48 hours or 6 to 24 hours or 6 to 12 hours. In another embodiment the time interval following administration is 5 to 20 days or 5 to 10 days.

[0265] In an embodiment, monitoring of the disease or disorder is carried out by repeating the method for diagnosing the disease or disease, for example, one month after initial diagnosis, six months after initial diagnosis, one year after initial diagnosis, etc.

[0266] Presence of the labeled molecule can be detected in the patient using methods known in the art for in vivo scanning. These methods depend upon the type of label used. Skilled artisans will be able to determine the appropriate method for detecting a particular label. Methods and devices that may be used in the diagnostic methods of the invention include, but are not limited to, computed tomography (CT), whole body scan such as position emission tomography (PET), magnetic resonance imaging (MRI), and sonography.

[0267] In a specific embodiment, the molecule is labeled with a radioisotope and is detected in the patient using a radiation responsive surgical instrument (Thurston et al., U.S. Pat. No. 5,441,050). In another embodiment, the molecule is labeled with a fluorescent compound and is detected in the patient using a fluorescence responsive scanning instrument. In another embodiment, the molecule is labeled with a positron emitting metal and is detected in the patent using positron emission-tomography. In yet another embodiment, the molecule is labeled with a paramagnetic label and is detected in a patient using magnetic resonance imaging (MRI).

[0268] Kits

[0269] The present invention provides kits that can be used in the above methods. In one embodiment, a kit comprises an antibody, preferably a purified antibody, in one or more containers. In a specific embodiment, the kits of the present invention contain a substantially isolated polypeptide comprising an epitope which is specifically immunoreactive with an antibody included in the kit. Preferably, the kits of the present invention further comprise a control antibody which does not react with the polypeptide of interest. In another specific embodiment, the kits of the present invention contain a means for detecting the binding of an antibody to a polypeptide of interest (e.g., the antibody may be conjugated to a detectable substrate such as a fluorescent compound, an enzymatic substrate, a radioactive compound or a luminescent compound, or a second antibody which recognizes the first antibody may be conjugated to a detectable substrate).

[0270] In another specific embodiment of the present invention, the kit is a diagnostic kit for use in screening serum containing antibodies specific against proliferative and/or cancerous polynucleotides and polypeptides. Such a kit may include a control antibody that does not react with the polypeptide of interest. Such a kit may include a substantially isolated polypeptide antigen comprising an epitope which is specifically immunoreactive with at least one anti-polypeptide antigen antibody. Further, such a kit includes means for detecting the binding of said antibody to the antigen (e.g., the antibody may be conjugated to a fluorescent compound such as fluorescein or rhodamine which can be detected by flow cytometry). In specific embodiments, the kit may include a recombinantly produced or chemically synthesized polypeptide antigen. The polypeptide antigen of the kit may also be attached to a solid support.

[0271] In a more specific embodiment the detecting means of the above-described kit includes a solid support to which said polypeptide antigen is attached. Such a kit may also include a non-attached reporter-labeled anti-human antibody. In this embodiment, binding of the antibody to the polypeptide antigen can be detected by binding of the said reporter-labeled antibody.

[0272] In an additional embodiment, the invention includes a diagnostic kit for use in screening serum containing antigens of the polypeptide of the invention. The diagnostic kit includes a substantially isolated antibody specifically immunoreactive with polypeptide or polynucleotide antigens, and means for detecting the binding of the polynucleotide or polypeptide antigen to the antibody. In one embodiment, the antibody is attached to a solid support. In a specific embodiment, the antibody may be a monoclonal antibody. The detecting means of the kit may include a second, labeled monoclonal antibody. Alternatively, or in addition, the detecting means may include a labeled, competing antigen.

[0273] In one diagnostic configuration, test serum is reacted with a solid phase reagent having a surface-bound antigen obtained by the methods of the present invention. After binding with specific antigen antibody to the reagent and removing unbound serum components by washing, the reagent is reacted with reporter-labeled anti-human antibody to bind reporter to the reagent in proportion to the amount of bound anti-antigen antibody on the solid support. The reagent is again washed to remove unbound labeled antibody, and the amount of reporter associated with the reagent is determined. Typically, the reporter is an enzyme which is detected by incubating the solid phase in the presence of a suitable fluorometric, luminescent or colorimetric substrate (Sigma, St. Louis, Mo.).

[0274] The solid surface reagent in the above assay is prepared by known techniques for attaching protein material to solid support material, such as polymeric beads, dip sticks, 96-well plate or filter material. These attachment methods generally include non-specific adsorption of the protein to the support or covalent attachment of the protein, typically through a free amine group, to a chemically reactive group on the solid support, such as an activated carboxyl, hydroxyl, or aldehyde group. Alternatively, streptavidin coated plates can be used in conjunction with biotinylated antigen(s).

[0275] Thus, the invention provides an assay system or kit for carrying out this diagnostic method. The kit generally includes a support with surface-bound recombinant antigens, and a reporter-labeled anti-human antibody for detecting surface-bound anti-antigen antibody.

[0276] Albumin Fusion Proteins

[0277] The present invention relates generally to albumin fusion proteins and methods of treating, preventing, or ameliorating diseases or disorders. As used herein, “albumin fusion protein” refers to a protein formed by the fusion of at least one molecule of albumin (or a fragment or variant thereof) to at least one molecule of a Therapeutic protein (or fragment or variant thereof). An albumin fusion protein of the invention comprises at least a fragment or variant of a Therapeutic protein and at least a fragment or variant of human serum albumin, which are associated with one another, preferably by genetic fusion (i.e., the albumin fusion protein is generated by translation of a nucleic acid in which a polynucleotide encoding all or a portion of a Therapeutic protein is joined in-frame with a polynucleotide encoding all or a portion of albumin) or chemical conjugation to one another. The Therapeutic protein and albumin protein, once part of the albumin fusion protein, may be referred to as a “portion”, “region” or “moiety” of the albumin fusion protein.

[0278] In one embodiment, the invention provides an albumin fusion protein comprising, or alternatively consisting of, a Therapeutic protein (e.g., as described in Table 1) and a serum albumin protein. In other embodiments, the invention provides an albumin fusion protein comprising, or alternatively consisting of, a biologically active and/or therapeutically active fragment of a Therapeutic protein and a serum albumin protein. In other embodiments, the invention provides an albumin fusion protein comprising, or alternatively consisting of, a biologically active and/or therapeutically active variant of a Therapeutic protein and a serum albumin protein. In preferred embodiments, the serum albumin protein component of the albumin fusion protein is the mature portion of serum albumin.

[0279] In further embodiments, the invention provides an albumin fusion protein comprising, or alternatively consisting of, a Therapeutic protein, and a biologically active and/or therapeutically active fragment of serum albumin. In further embodiments, the invention provides an albumin fusion protein comprising, or alternatively consisting of, a Therapeutic protein and a biologically active and/or therapeutically active variant of serum albumin. In preferred embodiments, the Therapeutic protein portion of the albumin fusion protein is the mature portion of the Therapeutic protein.

[0280] In further embodiments, the invention provides an albumin fusion protein comprising, or alternatively consisting of, a biologically active and/or therapeutically active fragment or variant of a Therapeutic protein and a biologically active and/or therapeutically active fragment or variant of serum albumin. In preferred embodiments, the invention provides an albumin fusion protein comprising, or alternatively consisting of, the mature portion of a Therapeutic protein and the mature portion of serum albumin.

[0281] Preferably, the albumin fusion protein comprises HA as the N-terminal portion, and a Therapeutic protein as the C-terminal portion. Alternatively, an albumin fusion protein comprising HA as the C-terminal portion, and a Therapeutic protein as the N-terminal portion may also be used.

[0282] In other embodiments, the albumin fusion protein has a Therapeutic protein fused to both the N-terminus and the C-terminus of albumin. In a preferred embodiment, the Therapeutic proteins fused at the N- and C- termini are the same Therapeutic proteins. In a preferred embodiment, the Therapeutic proteins fused at the N- and C- termini are different Therapeutic proteins. In another preferred embodiment, the Therapeutic proteins fused at the N- and C- termini are different Therapeutic proteins which may be used to treat or prevent the same disease, disorder, or condition (e.g. as listed in the “Preferred Indication Y” column of Table 1). In another preferred embodiment, the Therapeutic proteins fused at the N— and C-termini are different Therapeutic proteins which may be used to treat or prevent diseases or disorders (e.g. as listed in the “Preferred Indication Y” column of Table 1) which are known in the art to commonly occur in patients simultaneously.

[0283] In addition to albumin fusion protein in which the albumin portion is fused N- terminal and/or C-terminal of the Therapeutic protein portion, albumin fusion proteins of the invention may also be produced by inserting the Therapeutic protein or peptide of interest (e.g., a Therapeutic protein X as diclosed in Table 1, or an antibody that binds a Therapeutic protein or a fragment or variant thereof) into an internal region of HA. For instance, within the protein sequence of the HA molecule a number of loops or turns exist between the end and beginning of α-helices, which are stabilized by disulphide bonds (see FIGS. 9-11). The loops, as determined from the crystal structure of HA (FIG. 13) (PDB identifiers 1AO6, 1BJ5, 1BKE, 1BM0, 1E7E to 1E71 and 1UOR) for the most part extend away from the body of the molecule. These loops are useful for the insertion, or internal fusion, of therapeutically active peptides, particularly those requiring a secondary structure to be functional, or Therapeutic proteins, to essentially generate an albumin molecule with specific biological activity.

[0284] Loops in human albumin structure into which peptides or polypeptides may be inserted to generate albumin fusion proteins of invention include: Val54-Asn61, Thr76-Asp89, Ala92-Glu100, Gln170-Ala176, His247-Glu252, Glu 266-Glu 280-His288, Ala362-Glu368, Lys439-Pro447,Val462-Lys475, Thr478-Pro486, and Lys560-Thr566. In more preferred embodiments, peptides or polypeptides are inserted into the Val54-Asn61, Gln170-Ala176, and/or Lys560-Thr566 loops of mature human albumin (SEQ ID NO:18).

[0285] Peptides to be insened may be derived from either phage display or synthetic peptide libraries screened for specific biological activity or from the active portions of a molecule with the desired function. Additionally, random peptide libraries may be generated within particular loops or by insertions of randomized peptides into particular loops of the HA molecule and in which all possible combinations of amino acids are represented.

[0286] Such library(s) could be generated on HA or domain fragments of HA by one of the following methods: (a) randomized mutation of amino acids within one or more peptide loops of HA or HA domain fragments. Either one, more or all the residues within a loop could be mutated in this manner (for example see FIG. 10a); (b) replacement of, or insertion into one or more loops of HA or HA domain fragments (i.e., internal fusion) of a randomized peptide(s) of length Xₙ (where X is an amino acid and n is the number of residues (for example see FIG. 10b); (c) N—, C— or N— and C-terminal peptide/protein fusions in addition to (a) and/or (b).

[0287] The HA or HA domain fragment may also be made multifunctional by grafting the peptides derived from different screens of different loops against different targets into the same HA or HA domain fragment.

[0288] In preferred embodiments, peptides inserted into a loop of human serum albumin are peptide fragments or peptide variants of the Therapeutic proteins disclosed in Table 1. More particulary, the invention encompasses albumin fusion proteins which comprise peptide fragments or peptide variants at least 7 at least 8, at least 9, at least 10, at least 11, at least 12, at least 13, at least 14, at least 15, at least 20, at least 25, at least 30, at least 35, or at least 40 amino acids in length inserted into a loop of human serum albumin. The invention also encompasses albumin fusion proteins which comprise peptide fragments or peptide variants at least 7 at least 8, at least 9, at least 10, at least 11, at least 12, at least 13, at least 14, at least 15, at least 20, at least 25, at least 30, at least 35, or at least 40 amino acids fused to the N-terminus of human serum albumin. The invention also encompasses albumin fusion proteins which comprise peptide fragments or peptide variants at least 7 at least 8, at least 9, at least 10, at least 11, at least 12, at least 13, at least 14, at least 15, at least 20, at least 25, at least 30, at least 35, or at least 40 amino acids fused to the C-terminus of human serum albumin.

[0289] Generally, the albumin fusion proteins of the invention may have one HA-derived region and one Therapeutic protein-derived region. Multiple regions of each protein, however, may be used to make an albumin fusion protein of the invention. Similarly, more than one Therapeutic protein may be used to make an albumin fusion protein of the invention. For instance, a Therapeutic protein may be fused to both the N— and C-terminal ends of the HA. In such a configuration, the Therapeutic protein portions may be the same or different Therapeutic protein molecules. The structure of bifunctional albumin fusion proteins may be represented as: X—HA-Y or Y—HA-X.

[0290] For example, an anti-BLyS™ scFv-HA-IFNα-2b fusion may be prepared to modulate the immune response to IFNα-2b by anti-BLyS™ scFv. An alternative is making a bi (or even multi) functional dose of HA-fusions e.g. HA-IFNα-2b fusion mixed with HA-anti-BLyS™ scFv fusion or other HA-fusions in various ratio's depending on function, half-life etc.

[0291] Bi- or multi-functional albumin fusion proteins may also be prepared to target the Therapeutic protein portion of a fusion to a target organ or cell type via protein or peptide at the opposite terminus of HA.

[0292] As an alternative to the fusion of known therapeutic molecules, the peptides could be obtained by screening libraries constructed as fusions to the N—, C— or N— and C-termini of HA, or domain fragment of HA, of typically 6, 8, 12, 20 or 25 or X. (where X is an amino acid (aa) and n equals the number of residues) randomized amino acids, and in which all possible combinations of amino acids were represented. A particular advantage of this approach is that the peptides may be selected in situ on the HA molecule and the properties of the peptide would therefore be as selected for rather than, potentially, modified as might be the case for a peptide derived by any other method then being attached to HA.

[0293] Additionally, the albumin fusion proteins of the invention may include a linker peptide between the fused portions to provide greater physical separation between the moieties and thus maximize the accessibility of the Therapeutic protein portion, for instance, for binding to its cognate receptor. The linker peptide may consist of amino acids such that it is flexible or more rigid.

[0294] The linker sequence may be cleavable by a protease or chemically to yield the growth hormone related moiety. Preferably, the protease is one which is produced naturally by the host, for example the S. cerevisiae protease kex2 or equivalent proteases.

[0295] Therefore, as described above, the albumin fusion proteins of the invention may have the following formula R1-L-R2; R2-L-R1; or R1-L-R2-L-R1, wherein R1 is at least one Therapeutic protein, peptide or polypeptide sequence, and not necessarily the same Therapeutic protein, L is a linker and R2 is a serum albumin sequence.

[0296] In preferred embodiments, Albumin fusion proteins of the invention comprising a Therapeutic protein have extended shelf life compared to the shelf life the same Therapeutic protein when not fused to albumin. Shelf-life typically refers to the time period over which the therapeutic activity of a Therapeutic protein in solution or in some other storage formulation, is stable without undue loss of therapeutic activity. Many of the Therapeutic proteins are highly labile in their unfused state. As described below, the typical shelf-life of these Therapeutic proteins is markedly prolonged upon incorporation into the albumin fusion protein of the invention.

[0297] Albumin fusion proteins of the invention with “prolonged” or “extended” shelf-life exhibit greater therapeutic activity relative to a standard that has been subjected to the same storage and handling conditions. The standard may be the unfused full-length Therapeutic protein. When the Therapeutic protein portion of the albumin fusion protein is an analog, a variant, or is otherwise altered or does not include the complete sequence for that protein, the prolongation of therapeutic activity may alternatively be compared to the unfused equivalent of that analog, variant, altered peptide or incomplete sequence. As an example, an albumin fusion protein of the invention may retain greater than about 100% of the therapeutic activity, or greater than about 105%, 110%, 120%, 130%, 150% or 200% of the therapeutic activity of a standard when subjected to the same storage and handling conditions as the standard when compared at a given time point.

[0298] Shelf-life may also be assessed in terms of therapeutic activity remaining after storage, normalized to therapeutic activity when storage began. Albumin fusion proteins of the invention with prolonged or extended shelf-life as exhibited by prolonged or extended therapeutic activity may retain greater than about 50% of the therapeutic activity, about 60%, 70%, 80%, or 90% or more of the therapeutic activity of the equivalent unfused Therapeutic protein when subjected to the same conditions. For example, as discussed in Example 1, an albumin fusion protein of the invention comprising hGH fused to the full length HA sequence may retain about 80% or more of its original activity in solution for periods of up to 5 weeks or more under various temperature conditions.

[0299] Expression of Fusion Proteins

[0300] The albumin fusion proteins of the invention may be produced as recombinant molecules by secretion from yeast, a microorganism such as a bacterium, or a human or animal cell line. Preferably, the polypeptide is secreted from the host cells. We have found that, by fusing the hGH coding sequence to the HA coding sequence, either to the 5′ end or 3′ end, it is possible to secrete the albumin fusion protein from yeast without the requirement for a yeast-derived pro sequence. This was surprising, as other workers have found that a yeast derived pro sequence was needed for efficient secretion of hGH in yeast.

[0301] For example, Hiramatsu et al. (Appl Environ Microbiol 56:2125 (1990); Appl Environ Microbiol 57:2052 (1991)) found that the N-terminal portion of the pro sequence in the Mucor pusillus rennin pre-pro leader was important. Other authors, using the MF□-1 signal, have always included the MF□-1 pro sequence when secreting hGH. The pro sequences were believed to assist in the folding of the hGH by acting as an intramolecular chaperone. The present invention shows that HA or fragments of HA can perform a similar function.

[0302] Hence, a particular embodiment of the invention comprises a DNA construct encoding a signal sequence effective for directing secretion in yeast, particularly a yeast-derived signal sequence (especially one which is homologous to the yeast host), and the fused molecule of the first aspect of the invention, there being no yeast-derived pro sequence between the signal and the mature polypeptide.

[0303] The Saccharomyces cerevisiae invertase signal is a preferred example of a yeast-derived signal sequence.

[0304] Conjugates of the kind prepared by Poznansky et al., (FEBS Lett. 239:18 (1988)), in which separately-prepared polypeptides joined by chemical cross-linking, are not contemplated.

[0305] The present invention also includes a cell, preferably a yeast cell transformed to express an albumin fusion protein of the invention. In addition to the transformed host cells themselves, the present invention also contemplates a culture of those cells, preferably a monoclonal (clonally homogeneous) culture, or a culture derived from a monoclonal culture, in a nutrient medium. If the polypeptide is secreted, the medium will contain the polypeptide, with the cells, or without the cells if they have been filtered or centrifuged away. Many expression systems are known and may be used, including bacteria (for example E. coli and Bacillus subtilis), yeasts (for example Saccharomyces cerevisiae, Kluyveromyces lactis and Pichia pastoris, filamentous fungi (for example Aspergillus), plant cells, animal cells and insect cells.

[0306] Preferred yeast strains to be used in the production of albumin fusion proteins are D88, DXY1 and BXP10. D88 [leu2-3, leu2-122, can1, pra1, ubc4] is a derivative of parent strain AH22his⁺ (also known as DB1; see, e.g., Sleep et al. Biotechnology 8:42-46 (1990)). The strain contains a leu2 mutation which allows for auxotropic selection of 2 micron-based plasmids that contain the LEU2 gene. D88 also exhibits a derepression of PRB1 in glucose excess. The PRB1 promoter is normally controlled by two checkpoints that monitor glucose levels and growth stage. The promoter is activated in wild type yeast upon glucose depletion and entry into stationary phase. Strain D88 exhibits the repression by glucose but maintains the induction upon entry into stationary phase. The PRA1 gene encodes a yeast vacuolar protease, YscA endoprotease A, that is localized in the ER. The UBC4 gene is in the ubiquitination pathway and is involved in targeting short lived and abnormal proteins for ubiquitin dependant degradation. Isolation of this ubc4 mutation was found to increase the copy number of an expression plasmid in the cell and cause an increased level of expression of a desired protein expressed from the plasmid (see, e.g., International Publication No. WO99/00504, hereby incorporated in its entirety by reference herein).

[0307] DXY1, a derivative of D88, has the following genotype: [leu2-3, leu2-122, can1, pra1, ubc4, ura3::yap3]. In addition to the mutations isolated in D88, this strain also has a knockout of the YAP3 protease. This protease causes cleavage of mostly di-basic residues (RR, RK, KR, KK) but can also promote cleavage at single basic residues in proteins. Isolation of this yap3 mutation resulted in higher levels of full length HSA production (see, e.g., U.S. Pat. No. 5,965,386 and Kerry-Williams et al., Yeast 14:161-169 (1998), hereby incorporated in their entireties by reference herein).

[0308] BXP10 has the following genotype: leu2-3, leu2-122, can1, pra1, ubc4, ura3, yap3::URA3, lys2, hsp150::LYS2, pmt1::URA3. In addition to the mutations isolated in DXY1, this strain also has a knockout of the PMT1 gene and the HSP150 gene. The PMT1 gene is a member of the evolutionarily conserved family of dolichyl-phosphate-D-mannose protein O-mannosyltransferases (Pmts). The transmembrane topology of Pmt1p suggests that it is an integral membrane protein of the endoplasmic reticulum with a role in O-linked glycosylation. This mutation serves to reduce/eliminate O-linked glycosylation of HSA fusions (see, e.g., International Publication No. WO00/44772, hereby incorporated in its entirety by reference herein). Studies revealed that the Hsp150 protein is inefficiently separated from rHA by ion exchange chromatography. The mutation in the HSP150 gene removes a potential contaminant that has proven difficult to remove by standard purification techniques. See, e.g., U.S. Pat. No. 5,783,423, hereby incorporated in its entirety by reference herein.

[0309] The desired protein is produced in conventional ways, for example from a coding sequence inserted in the host chromosome or on a free plasmid. The yeasts are transformed with a coding sequence for the desired protein in any of the usual ways, for example electroporation. Methods for transformation of yeast by electroporation are disclosed in Becker & Guarente (1990) Methods Enzymol. 194, 182.

[0310] Successfully transformed cells, i.e., cells that contain a DNA construct of the present invention, can be identified by well known techniques. For example, cells resulting from the introduction of an expression construct can be grown to produce the desired polypeptide. Cells can be harvested and lysed and their DNA content examined for the presence of the DNA using a method such as that described by Southern (1975) J. Mol. Biol. 98, 503 or Berent et al. (1985) Biotech. 3, 208. Alternatively, the presence of the protein in the supernatant can be detected using antibodies.

[0311] Useful yeast plasmid vectors include pRS403-406 and pRS413-416 and are generally available from Stratagene Cloning Systems, La Jolla, Calif. 92037, USA. Plasmids pRS403, pRS404, pRS405 and pRS406 are Yeast Integrating plasmids (YIps) and incorporate the yeast selectable markers HIS3, 7RP1, LEU2 and URA3. Plasmids pRS413-416 are Yeast Centromere plasmids (Ycps).

[0312] Preferred vectors for making albumin fusion proteins for expression in yeast include pPPC0005, pScCHSA, pScNHSA, and pC4:HSA which are described in detail in Example 2. FIG. 4 shows a map of the pPPC0005 plasmid that can be used as the base vector into which polynucleotides encoding Therapeutic proteins may be cloned to form HA-fusions. It contains a PRB1 S. cerevisiae promoter (PRB1p), a Fusion leader sequence (FL), DNA encoding HA (rHA) and an ADH1 S. cerevisiae terminator sequence. The sequence of the fusion leader sequence consists of the first 19 amino acids of the signal peptide of human serum albumin (SEQ ID NO:29) and the last five amino acids of the mating factor alpha 1 promoter (SLDKR, see EP-A-387 319 which is hereby incorporated by reference in its entirety.

[0313] The plasmids, pPPC0005, pScCHSA, pScNHSA, and pC4:HSA were deposited on Apr. 11, 2001 at the American Type Culture Collection, 10801 University Boulevard, Manassas, Va. 20110-2209 and given accession numbers ATCC ______, ______, ______, and ______, respectively. Another vector useful for expressing an albumin fusion protein in yeast the pSAC35 vector which is described in Sleep et al., BioTechnology 8:42 (1990) which is hereby incorporated by reference in its entirety.

[0314] A variety of methods have been developed to operably link DNA to vectors via complementary cohesive termini. For instance, complementary homopolymer tracts can be added to the DNA segment to be inserted to the vector DNA. The vector and DNA segment are then joined by hydrogen bonding between the complementary homopolymeric tails to form recombinant DNA molecules.

[0315] Synthetic linkers containing one or more restriction sites provide an alternative method of joining the DNA segment to vectors. The DNA segment, generated by endonuclease restriction digestion, is treated with bacteriophage T4 DNA polymerase or E. coli DNA polymerase 1, enzymes that remove protruding, □-single-stranded termini with their 3′ 5′-exonucleolytic activities, and fill in recessed 3′-ends with their polymerizing activities.

[0316] The combination of these activities therefore generates blunt-ended DNA segments. The blunt-ended segments are then incubated with a large molar excess of linker molecules in the presence of an enzyme that is able to catalyze the ligation of blunt-ended DNA molecules, such as bacteriophage T4 DNA ligase. Thus, the products of the reaction are DNA segments carrying polymeric linker sequences at their ends. These DNA segments are then cleaved with the appropriate restriction enzyme and ligated to an expression vector that has been cleaved with an enzyme that produces termini compatible with those of the DNA segment.

[0317] Synthetic linkers containing a variety of restriction endonuclease sites are commercially available from a number of sources including International Biotechnologies Inc, New Haven, Conn., USA.

[0318] A desirable way to modify the DNA in accordance with the invention, if, for example, HA variants are to be prepared, is to use the polymerase chain reaction as disclosed by Saiki et al. (1988) Science 239, 487-491. In this method the DNA to be enzymatically amplified is flanked by two specific oligonucleotide primers which themselves become incorporated into the amplified DNA. The specific primers may contain restriction endonuclease recognition sites which can be used for cloning into expression vectors using methods known in the art.

[0319] Exemplary genera of yeast contemplated to be useful in the practice of the present invention as hosts for expressing the albumin fusion proteins are Pichia (Hansenula), Saccharomyces, Kluyveromyces, Candida, Torulopsis, Torulaspora, Schizosaccharomyces, Citeromyces, Pachysolen, Debaromyces, Metschunikowia, Rhodosporidium, Leucosporidium, Botryoascus, Sporidiobolus, Endomycopsis, and the like. Preferred genera are those selected from the group consisting of Saccharomyces, Schizosaccharomyces, Kluyveromyces, Pichia and Torulaspora. Examples of Saccharomyces spp. are S. cerevisiae, S. italicus and S. rouxii.

[0320] Examples of Kluyveromyces spp. are K. fragilis, K. lactis and K. marxianus. A suitable Torulaspora species is T. delbrueckii. Examples of Pichia (Hansenula) spp. are P. angusta (formerly H. polymorpha), P. anomala (formerly H. anomala) and P. pastoris. Methods for the transformation of S. cerevisiae are taught generally in EP 251 744, EP 258 067 and WO 90/01063, all of which are incorporated herein by reference.

[0321] Preferred exemplary species of Saccharomyces include S. cerevisiae, S. italicus, S. diastaticus, and Zygosaccharomyces rouxii. Preferred exemplary species of Kluyveromyces include K. fragilis and K. lactis. Preferred exemplary species of Hansenula include H. polymorpha (now Pichia angusta), H. anomala (now Pichia anomala), and Pichia capsulata. Additional preferred exemplary species of Pichia include P. pastoris. Preferred exemplary species of Aspergillus include A. niger and A. nidulans. Preferred exemplary species of Yarrowia include Y. lipolytica. Many preferred yeast species are available from the ATCC. For example, the following preferred yeast species are available from the ATCC and are useful in the expression of albumin fusion proteins: Saccharomyces cerevisiae Hansen, teleomorph strain BY4743 yap3 mutant (ATCC Accession No. 4022731); Saccharomyces cerevisiae Hansen, teleomorph strain BY4743 hsp150 mutant (ATCC Accession No. 4021266); Saccharomyces cerevisiae Hansen, teleomorph strain BY4743 pmt1 mutant (ATCC Accession No. 4023792); Saccharomyces cerevisiae Hansen, teleomorph (ATCC Accession Nos. 20626; 44773; 44774; and 62995); Saccharomyces diastaticus Andrews et Gilliland ex van der Walt, teleomorph (ATCC Accession No. 62987); Kluyveromyces lactis (Dombrowski) van der Walt, teleomorph (ATCC Accession No. 76492); Pichia angusta (Teunisson et al.) Kurtzman, teleomorph deposited as Hansenula polymorpha de Morais et Maia, teleomorph (ATCC Accession No. 26012); Aspergillus niger van Tieghem, anamorph (ATCC Accession No. 9029); Aspergillus niger van Tieghem, anamorph (ATCC Accession No. 16404); Aspergillus nidulans (Eidam) Winter, anamorph (ATCC Accession No. 48756); and Yarrowia lipolytica (Wickerham et al.) van der Walt et von Arx, teleomorph (ATCC Accession No. 201847).

[0322] Suitable promoters for S. cerevisiae include those associated with the PGK1 gene, GAL1 or GAL10 genes, CYCI, PHO5, TRPI, ADHI, ADH2, the genes for glyceraldehyde-3-phosphate dehydrogenase, hexokinase, pyruvate decarboxylase, phosphofructokinase, triose phosphate isomerase, phosphoglucose isomerase, glucokinase, alpha-mating factor pheromone, [a mating factor pheromone], the PRBI promoter, the GUT2 promoter, the GPDI promoter, and hybrid promoters involving hybrids of parts of 5′ regulatory regions with parts of 5′ regulatory regions of other promoters or with upstream activation sites (e.g. the promoter of EP-A-258 067).

[0323] Convenient regulatable promoters for use in Schizosaccharomyces pombe are the thiamine-repressible promoter from the nmt gene as described by Maundrell (1990) J. Biol. Chem. 265, 10857-10864 and the glucose repressible jbpl gene promoter as described by Hoffman & Winston (1990) Genetics 124, 807-816.

[0324] Methods of transforming Pichia for expression of foreign genes are taught in, for example, Cregg et al. (1993), and various Phillips patents (e.g. U.S. Pat. No. 4,857,467, incorporated herein by reference), and Pichia expression kits are commercially available from Invitrogen BV, Leek, Netherlands, and Invitrogen Corp., San Diego, Calif. Suitable promoters include AOXI and AOX2. Gleeson et al. (1986) J. Gen. Microbiol. 132, 3459-3465 include information on Hansenula vectors and transformation, suitable promoters being MOX1 and FMD1; whilst EP 361 991, Fleer et al. (1991) and other-publications from Rhone-Poulenc Rorer teach how to express foreign proteins in Kluyveromyces spp., a suitable promoter being PGKI.

[0325] The transcription termination signal is preferably the 3′ flanking sequence of a eukaryotic gene which contains proper signals for transcription termination and polyadenylation. Suitable 3′ flanking sequences may, for example, be those of the gene naturally linked to the expression control sequence used, i.e. may correspond to the promoter. Alternatively, they may be different in which case the termination signal of the S. cerevisiae ADHI gene is preferred.

[0326] The desired albumin fusion protein may be initially expressed with a secretion leader sequence, which may be any leader effective in the yeast chosen. Leaders useful in S. cerevisiae include that from the mating factor α polypeptide (MFα-1) and the hybrid leaders of EP-A-387 319. Such leaders (or signals) are cleaved by the yeast before the mature albumin is released into the surrounding medium. Further such leaders include those of S. cerevisiae invertase (SUC2) disclosed in JP 62-096086 (granted as 911036516), acid phosphatase (PH05), the pre-sequence of MFoz-1, 0 glucanase (BGL2) and killer toxin; S. diastaticus glucoamylase II; S. carlsbergensis β-galactosidase (MEL1); K. lactis killer toxin; and Candida glucoamylase.

[0327] Additional Methods of Recombinant and Synthetic Production of Albumin Fusion Proteins

[0328] The present invention also relates to vectors containing a polynucleotide encoding an albumin fusion protein of the present invention, host cells, and the production of albumin fusion proteins by synthetic and recombinant techniques. The vector may be, for example, a phage, plasmid, viral, or retroviral vector. Retroviral vectors may be replication competent or replication defective. In the latter case, viral propagation generally will occur only in complementing host cells.

[0329] The polynucleotides encoding albumin fusion proteins of the invention may be joined to a vector containing a selectable marker for propagation in a host. Generally, a plasmid vector is introduced in a precipitate, such as a calcium phosphate precipitate, or in a complex with a charged lipid. If the vector is a virus, it may be packaged in vitro using an appropriate packaging cell line and then transduced into host cells.

[0330] The polynucleotide insert should be operatively linked to an appropriate promoter, such as the phage lambda PL promoter, the E. coli lac, trp, phoA and tac promoters, the SV40 early and late promoters and promoters of retroviral LTRs, to name a few. Other suitable promoters will be known to the skilled artisan. The expression constructs will further contain sites for transcription initiation, termination, and, in the transcribed region, a ribosome binding site for translation. The coding portion of the transcripts expressed by the constructs will preferably include a translation initiating codon at the beginning and a termination codon (UAA, UGA or UAG) appropriately positioned at the end of the polypeptide to be translated.

[0331] As indicated, the expression vectors will preferably include at least one selectable marker. Such markers include dihydrofolate reductase, G418, glutamine synthase, or neomycin resistance for eukaryotic cell culture, and tetracycline, kanamycin or ampicillin resistance genes for culturing in E. coli and other bacteria. Representative examples of appropriate hosts include, but are not limited to, bacterial cells, such as E. coli, Streptomyces and Salmonella typhimurium cells; fungal cells, such as yeast cells (e.g., Saccharomyces cerevisiae or Pichia pastoris (ATCC Accession No. 201178)); insect cells such as Drosophila S2 and Spodoptera Sf9 cells; animal cells such as CHO, COS, NSO, 293, and Bowes melanoma cells; and plant cells. Appropriate culture mediums and conditions for the above-described host cells are known in the art.

[0332] Among vectors preferred for use in bacteria include pQE70, pQE60 and pQE-9, available from QIAGEN, Inc.; pBluescript vectors, Phagescript vectors, pNH8A, pNH16a, pNH18A, pNH46A, available from Stratagene Cloning Systems, Inc.; and ptrc99a, pKK233-3, pKK233-3, pDR540, pRIT5 available from Pharmacia Biotech, Inc. Among preferred eukaryotic vectors are pWLNEO, pSV2CAT, pOG44, pXT1 and pSG available from Stratagene; and pSVK3, pBPV, pMSG and pSVL available from Pharmacia. Preferred expression vectors for use in yeast systems include, but are not limited to pYES2, pYD1, pTEF1/Zeo, pYES2/GS, pPICZ, pGAPZ, pGAPZalph, pPIC9, pPIC3.5, pHIL-D2, pHIL-S1, pPIC3.5K, pPIC9K, and PA0815 (all available from Invitrogen, Carlbad, Calif.). Other suitable vectors will be readily apparent to the skilled artisan.

[0333] In one embodiment, polynucleotides encoding an albumin fusion protein of the invention may be fused to signal sequences which will direct the localization of a protein of the invention to particular compartments of a prokaryotic or eukaryotic cell and/or direct the secretion of a protein of the invention from a prokaryotic or eukaryotic cell. For example, in E. coli, one may wish to direct the expression of the protein to the periplasmic space. Examples of signal sequences or proteins (or fragments thereof) to which the albumin fusion proteins of the invention may be fused in order to direct the expression of the polypeptide to the periplasmic space of bacteria include, but are not limited to, the pelB signal sequence, the maltose binding protein (MBP) signal sequence, MBP, the ompA signal sequence, the signal sequence of the periplasmic E. coli heat-labile enterotoxin B-subunit, and the signal sequence of alkaline phosphatase. Several vectors are commercially available for the construction of fusion proteins which will direct the localization of a protein, such as the pMAL series of vectors (particularly the pMAL-p series) available from New England Biolabs. In a specific embodiment, polynucleotides albumin fusion proteins of the invention may be fused to the pelB pectate lyase signal sequence to increase the efficiency of expression and purification of such polypeptides in Gram-negative bacteria. See, U.S. Pat. Nos. 5,576,195 and 5,846,818, the contents of which are herein incorporated by reference in their entireties.

[0334] Examples of signal peptides that may be fused to an albumin fusion protein of the invention in order to direct its secretion in mammalian cells include, but are not limited to, the MPIF-1 signal sequence (e.g., amino acids 1-21 of GenBank Accession number AAB51134), the stanniocalcin signal sequence (MLQNSAVLLLLVISASA, SEQ ID NO:34), and a consensus signal sequence (MPTWAWWLFLVLLLALWAPARG, SEQ ID. NO:35). A suitable signal sequence that may be used in conjunction with baculoviral expression systems is the gp67 signal sequence (e.g., amino acids 1-19 of GenBank Accession Number AAA72759).

[0335] Vectors which use glutamine synthase (GS) or DHFR as the selectable markers can be amplified in the presence of the drugs methionine sulphoximine or methotrexate, respectively. An advantage of glutamine synthase based vectors are the availabilty of cell lines (e.g., the murine myeloma cell line, NSO) which are glutamine synthase negative. Glutamine synthase expression systems can also function in glutamine synthase expressing cells (e.g., Chinese Hamster Ovary (CHO) cells) by providing additional inhibitor to prevent the functioning of the endogenous gene. A glutamine synthase expression system and components thereof are detailed in PCT publications: WO87/04462; WO86/05807; WO89/01036; WO89/10404; and WO91/06657, which are hereby incorporated in their entireties by reference here Additionally, glutamine synthase expression vectors can be obtained from Lonza Biologics, Inc. (Portsmouth, N.H.). Expression and production of monoclonal antibodies using a GS expression system in murine myeloma cells is described in Bebbington et al., Bio/technology 10:169(1992) and in Biblia and Robinson Biotechnol. Prog. 11:1(1995) which are herein incorporated by reference.

[0336] The present invention also relates to host cells containing the above-described vector constructs described herein, and additionally encompasses host cells containing nucleotide sequences of the invention that are operably associated with one or more heterologous control regions (e.g., promoter and/or enhancer) using techniques known of in the art. The host cell can be a higher eukaryotic cell, such as a mammalian cell (e.g., a human derived cell), or a lower eukaryotic cell, such as a yeast cell, or the host cell can be a prokaryotic cell, such as a bacterial cell. A host strain may be chosen which modulates the expression of the inserted gene sequences, or modifies and processes the gene product in the specific fashion desired. Expression from certain promoters can be elevated in the presence of certain inducers; thus expression of the genetically engineered polypeptide may be controlled. Furthermore, different host cells have characteristics and specific mechanisms for the translational and post-translational processing and modification (e.g., phosphorylation, cleavage) of proteins. Appropriate cell lines can be chosen to ensure the desired modifications and processing of the foreign protein expressed.

[0337] Introduction of the nucleic acids and nucleic acid constructs of the invention into the host cell can be effected by calcium phosphate transfection, DEAE-dextran mediated transfection, cationic lipid-mediated transfection, electroporation, transduction, infection, or other methods. Such methods are described in many standard laboratory manuals, such as Davis et al., Basic Methods In Molecular Biology (1986). It is specifically contemplated that the polypeptides of the present invention may in fact be expressed by a host cell lacking a recombinant vector.

[0338] In addition to encompassing host cells containing the vector constructs discussed herein, the invention also encompasses primary, secondary, and immortalized host cells of vertebrate origin, particularly mammalian origin, that have been engineered to delete or replace endogenous genetic material (e.g., the coding sequence corresponding to a Therapeutic protein may be replaced with an albumin fusion protein corresponding to the Therapeutic protein), and/or to include genetic material (e.g., heterologous polynucleotide sequences such as for example, an albumin fusion protein of the invention corresponding to the Therapeutic protein may be included). The genetic material operably associated with the endogenous polynucleotide may activate, alter, and/or amplify endogenous polynucleotides.

[0339] In addition, techniques known in the art may be used to operably associate heterologous polynucleotides (e.g., polynucleotides encoding an albumin protein, or a fragment or variant thereof) and/or heterologous control regions (e.g., promoter and/or enhancer) with endogenous polynucleotide sequences encoding a Therapeutic protein via homologous recombination (see, e.g., U.S. Pat. No. 5,641,670, issued Jun. 24, 1997; International Publication Number WO 96/29411; International Publication Number WO 94/12650; Koller et al., Proc. Natl. Acad. Sci USA 86:8932-8935 (1989); and Zijlstra et al., Nature 342:435-438 (1989), the disclosures of each of which are incorporated by reference in their entireties).

[0340] Albumin fusion proteins of the invention can be recovered and purified from recombinant cell cultures by well-known methods including ammonium sulfate or ethanol precipitation, acid extraction, anion or cation exchange chromatography, phosphocellulose chromatography, hydrophobic interaction chromatography, affinity chromatography, hydroxylapatite chromatography, hydrophobic charge interaction chromatography and lectin chromatography. Most preferably, high performance liquid chromatography (“HPLC”) is employed for purification.

[0341] In preferred embodiments the albumin fusion proteins of the invention are purified using Anion Exchange Chromatography including, but not limited to, chromatography on Q-sepharose, DEAE sepharose, poros HQ, poros DEAE, Toyopearl Q, Toyopearl QAE, Toyopearl DEAE, Resource/Source Q and DEAE, Fractogel Q and DEAE columns.

[0342] In specific embodiments the albumin fusion proteins of the invention are purified using Cation Exchange Chromatography including, but not limited to, SP-sepharose, CM sepharose, poros HS, poros CM, Toyopearl SP, Toyopearl CM, Resource/Source S and CM, Fractogel S and CM columns and their equivalents and comparables.

[0343] In specific embodiments the albumin fusion proteins of the invention are purified using Hydrophobic Interaction Chromatography including, but not limited to, Phenyl, Butyl, Methyl, Octyl, Hexyl-sepharose, poros Phenyl, Butyl, Methyl, Octyl, Hexyl, Toyopearl Phenyl, Butyl, Methyl, Octyl, Hexyl Resource/Source Phenyl, Butyl, Methyl, Octyl, Hexyl, Fractogel Phenyl, Butyl, Methyl, Octyl, Hexyl columns and their equivalents and comparables.

[0344] In specific embodiments the albumin fusion proteins of the invention are purified using Size Exclusion Chromatography including, but not limited to, sepharose S100, S200, S300, superdex resin columns and their equivalents and comparables.

[0345] In specific embodiments the albumin fusion proteins of the invention are purified using Affinity Chromatography including, but not limited to, Mimetic Dye affinity, peptide affinity and antibody affinity columns that are selective for either the HSA or the “fusion target” molecules.

[0346] In preferred embodiments albumin fusion proteins of the invention are purified using one or more Chromatography methods listed above. In other preferred embodiments, albumin fusion proteins of the invention are purified using one or more of the following Chromatography columns, Q sepharose FF column, SP Sepharose FF column, Q Sepharose High Performance Column, Blue Sepharose FF column, Blue Column, Phenyl Sepharose FF column, DEAE Sepharose FF, or Methyl Column.

[0347] Additionally, albumin fusion proteins of the invention may be purified using the process described in PCT International Publication WO 00/44772 which is herein incorporated by reference in its entirety. One of skill in the art could easily modify the process described therein for use in the purification of albumin fusion proteins of the invention.

[0348] Albumin fusion proteins of the present invention may be recovered from: products of chemical synthetic procedures; and products produced by recombinant techniques from a prokaryotic or eukaryotic host, including, for example, bacterial, yeast, higher plant, insect, and mammalian cells. Depending upon the host employed in a recombinant production procedure, the polypeptides of the present invention may be glycosylated or may be non-glycosylated. In addition, albumin fusion proteins of the invention may also include an initial modified methionine residue, in some cases as a result of host-mediated processes. Thus, it is well known in the art that the N-terminal methionine encoded by the translation initiation codon generally is removed with high efficiency from any protein after translation in all eukaryotic cells. While the N-terminal methionine on most proteins also is efficiendy removed in most prokaryotes, for some proteins, this prokaryotic removal process is inefficient, depending on the nature of the amino acid to which the N-terminal methionine is covalently linked.

[0349] In one embodiment, the yeast Pichia pastoris is used to express albumin fusion proteins of the invention in a eukaryotic system. Pichia pastoris is a methylotrophic yeast which can metabolize methanol as its sole carbon source. A main step in the methanol metabolization pathway is the oxidation of methanol to formaldehyde using O₂. This reaction is catalyzed by the enzyme alcohol oxidase. In order to metabolize methanol as its sole carbon source, Pichia pastoris must generate high levels of alcohol oxidase due, in part, to the relatively low affinity of alcohol oxidase for O₂. Consequently, in a growth medium depending on methanol as a main carbon source, the promoter region of one of the two alcohol oxidase genes (AOX1) is highly active. In the presence of methanol, alcohol oxidase produced from the AOX1 gene comprises up to approximately 30% of the total soluble protein in Pichia pastoris. See Ellis, S. B., et al., Mol. Cel. Biol. 5:1111-21 (1985); Koutz, P. J, et al., Yeast 5:167-77 (1989); Tschopp, J. F., et al., Nucl. Acids Res. 15:3859-76 (1987). Thus, a heterologous coding sequence, such as, for example, a polynucleotide of the present invention, under the transcriptional regulation of all or part of the AOX1 regulatory sequence is expressed at exceptionally high levels in Pichia yeast grown in the presence of methanol.

[0350] In one example, the plasmid vector pPIC9K is used to express DNA encoding an albumin fusion protein of the invention, as set forth herein, in a Pichea yeast system essentially as described in “Pichia Protocols: Methods in Molecular Biology,” D. R. Higgins and J. Cregg, eds. The Humana Press, Totowa, N.J., 1998. This expression vector allows expression and secretion of a polypeptide of the invention by virtue of the strong AOX1 promoter linked to the Pichia pastoris alkaline phosphatase (PHO) secretory signal peptide (i.e., leader) located upstream of a multiple cloning site.

[0351] Many other yeast vectors could be used in place of pPIC9K, such as, pYES2, PYD1, pTEF1/Zeo, pYES2/GS, pPICZ, pGAPZ, pGAPZalpha, pPIC9, pPIC3.5, pHIL-D2, pHIL-S1, pPIC3.5K, and PAO815, as one skilled in the art would readily appreciate, as long as the proposed expression construct provides appropriately located signals for transcription, translation, secretion (if desired), and the like, including an in-frame AUG as required.

[0352] In another embodiment, high-level expression of a heterologous coding sequence, such as, for example, a polynucleotide encoding an albumin fusion protein of the present invention, may be achieved by cloning the heterologous polynucleotide of the invention into an expression vector such as, for example, pGAPZ or pGAPZalpha, and growing the yeast culture in the absence of methanol.

[0353] In addition, albumin fusion proteins of the invention can be chemically synthesized using techniques known in the art (e.g., see Creighton, 1983, Proteins: Structures and Molecular Principles, W. H. Freeman & Co., N.Y., and Hunkapiller et al., Nature, 310:105-111 (1984)). For example, a polypeptide corresponding to a fragment of a polypeptide can be synthesized by use of a peptide synthesizer. Furthermore, if desired, nonclassical amino acids or chemical amino acid analogs can be introduced as a substitution or addition into the polypeptide sequence. Non-classical amino acids include, but are not limited to, to the D-isomers of the common amino acids, 2,4-diaminobutyric acid, a-amino isobutyric acid, 4-aminobutyric acid, Abu, 2-amino butyric acid, g-Abu, e-Ahx, 6-amino hexanoic acid, Aib, 2-amino isobutyric acid, 3-amino propionic acid, ornithine, norleucine, norvaline, hydroxyproline, sarcosine, citrulline, homocitrulline, cysteic acid, t-butylglycine, t-butylalanine, phenylglycine, cyclohexylalanine, b-alanine, fluoro-amino acids, designer amino acids such as b-methyl amino acids, Ca-methyl amino acids, Na-methyl amino acids, and amino acid analogs in general. Furthermore, the amino acid can be D (dextrorotary) or L (levorotary).

[0354] The invention encompasses albumin fusion proteins of the present invention which are differentially modified during or after translation, e.g., by glycosylation, acetylation, phosphorylation, amidation, derivatization by known protecting/blocking groups, proteolytic cleavage, linkage to an antibody molecule or other cellular ligand, etc. Any of numerous chemical modifications may be carried out by known techniques, including but not limited, to specific chemical cleavage by cyanogen bromide, trypsin, chymotrypsin, papain, V8 protease, NaBH₄; acetylation, formylation, oxidation, reduction; metabolic synthesis in the presence of tunicamycin; etc.

[0355] Additional post-translational modifications encompassed by the invention include, for example, e.g., N-linked or O-linked carbohydrate chains, processing of N-terminal or C-terminal ends), attachment of chemical moieties to the amino acid backbone, chemical modifications of N-linked or O-linked carbohydrate chains, and addition or deletion of an N-terminal methionine residue as a result of procaryotic host cell expression. The albumin fusion proteins may also be modified with a detectable label, such as an enzymatic, fluorescent, isotopic or affinity label to allow for detection and isolation of the protein.

[0356] Examples of suitable enzymes include horseradish peroxidase, alkaline phosphatase, beta-galactosidase, or acetylcholinesterase; examples of suitable prosthetic group complexes include streptavidin/biotin and avidin/biotin; examples of suitable fluorescent materials include umbeliferone, fluorescein, fluorescein isothiocyanate, rhodamine, dichlorotriazinylamine fluorescein, dansyl chloride or phycoerythrin; an example of a luminescent material includes luminol; examples of bioluminescent materials include luciferase, luciferin, and aequorin; and examples of suitable radioactive material include iodine (¹²¹I, ¹²³I, ¹²⁵I, ¹³¹I), carbon (¹⁴C), sulfur (³⁵S), tritium, (³H), indium (¹¹¹In, ¹¹²In, ^{113m}In, ^{115m}In), technetium (⁹⁹Tc,^{99m}Tc), thallium (²⁰¹Ti), gallium (⁶⁸Ga, ⁶⁷Ga), palladium (¹⁰³Pd), molybdenum (⁹⁹Mo), xenon (¹¹³Xe), fluorine (¹⁸F), ¹⁵³Sm, ¹⁷⁷Lu, ¹⁵⁹Gd, ¹⁴⁹Pm, ¹⁴⁰La, ¹⁷⁵Yb, ¹⁶⁶Ho, ⁹⁰Y, ⁴⁷Sc, ¹⁸⁶Re, ¹⁸⁸Re, ¹⁴²Pr, ¹⁰⁵Rh, and ⁹⁷Ru.

[0357] In specific embodiments, albumin fusion proteins of the present invention or fragments or variants thereof are attached to macrocyclic chelators that associate with radiometal ions, including but not limited to, ¹⁷⁷Lu, ⁹⁰Y, ¹⁶⁶Ho, and ¹⁵³Sm, to polypeptides. In a preferred embodiment, the radiometal ion associated with the macrocyclic chelators is ¹¹¹In. In another preferred embodiment, the radiometal ion associated with the macrocyclic chelator is ⁹⁰Y. In specific embodiments, the macrocyclic chelator is 1,4,7,10-tetraazacyclododecane-N,N′,N″,N′″-tetraacetic acid (DOTA). In other specific embodiments, DOTA is attached to an antibody of the invention or fragment thereof via linker molecule. Examples of linker molecules useful for conjugating DOTA to a polypeptide are commonly known in the art—see, for example, DeNardo et al., Clin Cancer Res. 4(10):2483-90 (1998); Peterson et al., Bioconjug. Chem. 10(4):533-7 (1999); and Zimmerman et al, Nucl. Med. Biol. 26(8):943-50 (1999); which are hereby incorporated by reference in their entirety.

[0358] As mentioned, the albumin fusion proteins of the invention may be modified by either natural processes, such as post-translational processing, or by chemical modification techniques which are weli known in the art. It will be appreciated that the same type of modification may be present in the same or varying degrees at several sites in a given polypeptide. Polypeptides of the invention may be branched, for example, as a result of ubiquitination, and they may be cyclic, with or without branching. Cyclic, branched, and branched cyclic polypeptides may result from posttranslation natural processes or may be made by synthetic methods. Modifications include acetylation, acylation, ADP-ribosylation, amidation, covalent attachment of flavin, covalent attachment of a heme moiety, covalent attachment of a nucleotide or nucleotide derivative, covalent attachment of a lipid or lipid derivative, covalent attachment of phosphotidylinositol, cross-linking, cyclization, disulfide bond formation, demethylation, formation of covalent cross-links, formation of cysteine, formation of pyroglutamate, formylation, gamma-carboxylation, glycosylation, GPI anchor formation, hydroxylation, iodination, methylation, myristylation, oxidation, pegylation, proteolytic processing, phosphorylation, prenylation, racemization, selenoylation, sulfation, transfer-RNA mediated addition of amino acids to proteins such as arginylation, and ubiquitination. (See, for instance, PROTEINS—STRUCTURE AND MOLECULAR PROPERTIES, 2nd Ed., T. E. Creighton, W. H. Freeman and Company, New York (1993); POST-TRANSLATIONAL COVALENT MODIFICATION OF PROTEINS, B. C. Johnson, Ed., Academic Press, New York, pgs. 1-12 (1983); Seifter et al., Meth. Enzymol. 182:626-646 (1990); Rattan et al., Ann. N.Y. Acad. Sci. 663:48-62 (1992)).

[0359] Albumin fusion proteins of the invention and antibodies that bind a Therapeutic protein or fragments or variants thereof can be fused to marker sequences, such as a peptide to facilitate purification. In preferred embodiments, the marker amino acid sequence is a hexa-histidine peptide, such as the tag provided in a pQE vector (QIAGEN,. Inc., 9259 Eton Avenue, Chatsworth, Calif., 91311), among others, many of which are commercially available. As described in Gentz et at., Proc. Natl. Acad. Sci. USA 86:821-824 (1989), for instance, hexa-histidine provides for convenient purification of the fusion protein. Other peptide tags useful for purification include, but are not limited to, the “HA” tag, which corresponds to an epitope derived from the influenza hemagglutinin protein (Wilson et al., Cell 37:767 (1984)) and the “flag” tag.

[0360] Further, an albumin fusion protein of the invention may be conjugated to a therapeutic moiety such as a cytotoxin, e.g., a cytostatic or cytocidal agent, a therapeutic agent or a radioactive metal ion, e.g., alpha-emitters such as, for example, 213Bi. A cytotoxin or cytotoxic agent includes any agent that is detrimental to cells. Examples include paclitaxol, cytochalasin B, gramicidin D, ethidium bromide, emetine, mitomycin, etoposide, tenoposide, vincristine, vinblastine, colchicin, doxorubicin, daunorubicin, dihydroxy anthracin dione, mitoxantrone, mithramycin, actinomycin D, 1-dehydrotestosterone, glucocorticoids, procaine, tetracaine, lidocaine, propranolol, and puromycin and analogs or homologs thereof. Therapeutic agents include, but are not limited to, antimetabolites (e.g., methotrexate, 6-mercaptopurine, 6-thioguanine, cytarabine, 5-fluorouracil decarbazine), alkylating agents (e.g., mechlorethamine, thioepa chlorambucil, melphalan, carmustine (BSNU) and lomustine (CCNU), cyclothosphamide, busulfan, dibromomannitol, streptozotocin, mitomycin C, and cis-dichlorodiamine platinum (II) (DDP) cisplatin), anthracyclines (e.g., daunorubicin (formerly daunomycin) and doxorubicin), antibiotics (e.g., dactinomycin (formerly actinomycin), bleomycin, mithramycin, and anthramycin (AMC)), and anti-mitotic agents (e.g., vincristine and vinblastine).

[0361] The conjugates of the invention can be used for modifying a given biological response, the therapeutic agent or drug moiety is not to be construed as limited to classical chemical therapeutic agents. For example, the drug moiety may be a protein or polypeptide possessing a desired biological activity. Such proteins may include, for example, a toxin such as abrin, ricin A, pseudomonas exotoxin, or diphtheria toxin; a protein such as tumor necrosis factor, alpha-interferon, β-interferon, nerve growth factor, platelet derived growth factor, tissue plasminogen activator, an apoptotic agent, e.g., TNF-alpha, TNF-beta, AIM I (See, International Publication No. WO 97/33899), AIM II (See, Intemational Publication No. WO 97/34911), Fas Ligand (Takahashi et al., Int. Immunol., 6:1567-1574 (1994)), VEGI (See, International Publication No. WO 99/23105), a thrombotic agent or an anti-angiogenic agent, e.g., angiostatin or endostatin; or, biological response modifiers such as, for example, lymphokines, interleukin-1 (“IL-1”), interleukin-2 (“IL-2”), interleukin-6 (“IL-6”), granulocyte macrophage colony stimulating factor (“GM-CSF”), granulocyte colony stimulating factor (“G-CSF”), or other growth factors. Techniques for conjugating such therapeutic moiety to proteins (e.g., albumin fusion proteins) are well known in the art.

[0362] Albumin fusion proteins may also be attached to solid supports, which are particularly useful for immunoassays or purification of polypeptides that are bound by, that bind to, or associate with albumin fusion proteins of the invention. Such solid supports include, but are not limited to, glass, cellulose, polyacrylamide, nylon, polystyrene, polyvinyl chloride or polypropylene.

[0363] Albumin fusion proteins, with or without a therapeutic moiety conjugated to it, administered alone or in combination with cytotoxic factor(s) and/or cytokine(s) can be used as a therapeutic.

[0364] In embodiments where the albumin fusion protein of the invention comprises only the VH domain of an antibody that binds a Therapeutic protein, it may be necessary and/or desirable to coexpress the fusion protein with the VL domain of the same antibody that binds a Therapeutic protein, such that the VH-albumin fusion protein and VL protein will associate (either covalently or non-covalently) post-translationally.

[0365] In embodiments where the albumin fusion protein of the invention comprises only the VL domain of an antibody that binds a Therapeutic protein, it may be necessary and/or desirable to coexpress the fusion protein with the VH domain of the same antibody that binds a Therapeutic protein, such that the VL-albumin fusion protein and VH protein will associate (either covalently or non-covalently) post-translationally.

[0366] Some Therapeutic antibodies are bispecific antibodies, meaning the antibody that binds a Therapeutic protein is an artificial hybrid antibody having two different heavy/light chain pairs and two different binding sites. In order to create an albumin fusion protein corresponding to that Therapeutic protein, it is possible to create an albumin fusion protein which has an scFv fragment fused to both the N— and C-terminus of the albumin protein moiety. More particularly, the scFv fused to the N-terminus of albumin would correspond to one of the heavy/light (VH/VL) pairs of the original antibody that binds a Therapeutic protein and the scFv fused to the C-terminus of albumin would correspond to the other heavy/tight (VH/VL) pair of the original antibody that binds a Therapeutic protein.

[0367] Also provided by the invention are chemically modified derivatives of the albumin fusion proteins of the invention which may provide additional advantages such as increased solubility, stability and circulating time of the polypeptide, or decreased immunogenicity (see U.S. Pat. No. 4,179,337). The chemical moieties for derivitization may be selected from water soluble polymers such as polyethylene glycol, ethylene glycol/propylene glycol copolymers, carboxymethylcellulose, dextran, polyvinyl alcohol and the like. The albumin fusion proteins may be modified at random positions within the molecule, or at predetermined positions within the molecule and may include one, two, three or more attached chemical moieties.

[0368] The polymer may be of any molecular weight, and may be branched or unbranched. For polyethylene glycol, the preferred molecular weight is between about 1 kDa and about 100 kDa (the term “about” indicating that in preparations of polyethylene glycol, some molecules will weigh more, some less, than the stated molecular weight) for ease in handling and manufacturing. Other sizes may be used, depending on the desired therapeutic profile (e.g., the duration of sustained release desired, the effects, if any on biological activity, the ease in handling, the degree or lack of antigenicity and other known effects of the polyethylene glycol to a Therapeutic protein or analog). For example, the polyethylene glycol may have an average molecular weight of about 200, 500, 1000, 1500, 2000, 2500, 3000, 3500, 4000, 4500, 5000, 5500, 6000, 6500, 7000, 7500, 8000, 8500, 9000, 9500, 10,000, 10,500, 11,000, 11,500, 12,000, 12,500, 13,000, 13,500, 14,000, 14,500, 15,000, 15,500, 16,000, 16,500, 17,000, 17,500, 18,000, 18,500, 19,000, 19,500, 20,000, 25,000, 30,000, 35,000, 40,000, 45,000, 50,000, 55,000, 60,000, 65,000, 70,000, 75,000, 80,000, 85,000, 90,000, 95,000, or 100,000 kDa.

[0369] As noted above, the polyethylene glycol may have a branched structure. Branched polyethylene glycols are described, for example, in U.S. Pat. No. 5,643,575; Morpurgo et al., Appl. Biochem. Biotechnol. 56:59-72 (1996); Vorobjev et al., Nucleosides Nucleotides 18:2745-2750 (1999); and Caliceti et al., Bioconjug. Chem. 10:638-646 (1999), the disclosures of each of which are incorporated herein by reference.

[0370] The polyethylene glycol molecules (or other chemical moieties) should be attached to the protein with consideration of effects on functional or antigenic domains of the protein. There are a number of attachment methods available to those skilled in the art, such as, for example, the method disclosed in EP 0 401 384 (coupling PEG to G-CSF), herein incorporated by reference; see also Malik et al., Exp. Hematol. 20:1028-1035 (1992), reporting pegylation of GM-CSF using tresyl chloride. For example, polyethylene glycol may be covalently bound through amino acid residues via reactive group, such as a free amino or carboxyl group. Reactive groups are those to which an activated polyethylene glycol molecule may be bound. The amino acid residues having a free amino group may include lysine residues and the N-terminal amino acid residues; those having a free carboxyl group may include aspartic acid residues glutamic acid residues and the C-terminal amino acid residue. Sulfhydryl groups may also be used as a reactive group for attaching the polyethylene glycol molecules. Preferred for therapeutic purposes is attachment at an amino group, such as attachment at the N-terminus or lysine group.

[0371] As suggested above, polyethylene glycol may be attached to proteins via linkage to any of a number of amino acid residues. For example, polyethylene glycol can be linked to proteins via covalent bonds to lysine, histidine, aspartic acid, glutamic acid, or cysteine residues. One or more reaction chemistries may be employed to attach polyethylene glycol to specific amino acid residues (e.g., lysine, histidine, aspartic acid, glutarnic acid, or cysteine) of the protein or to more than one type of amino acid residue (e.g., lysine, histidine, aspartic acid, glutaraic acid, cysteine and combinations thereof) of the protein.

[0372] One may specifically desire proteins chemically modified at the N-terminus. Using polyethylene glycol as an illustration of the present composition, one may select from a variety of polyethylene glycol molecules (by molecular weight, branching, etc.), the proportion of polyethylene glycol molecules to protein (polypeptide) molecules in the reaction mix, the type of pegylation reaction to be performed, and the method of obtaining the selected N-terminally pegylated protein. The method of obtaining the N-terminally pegylated preparation (i.e., separating this moiety from other monopegylated moieties if necessary) may be by purification of the N-terminally pegylated material from a population of pegylated protein molecules. Selective proteins chemically modified at the N-terminus modification may be accomplished by reductive alkylation which exploits differential reactivity of different types of primary amino groups (lysine versus the N-terminal) available for derivatization in a particular protein. Under the appropriate reaction conditions, substantially selective derivatization of the protein at the N-terminus with a carbonyl group containing polymer is achieved.

[0373] As indicated above, pegylation of the albumin fusion proteins of the invention may be accomplished by any number of means. For example, polyethylene glycol may be attached to the albumin fusion protein either directly or by an intervening linker. Linkerless systems for attaching polyethylene glycol to proteins are described in Delgado et al., Crit. Rev. Thera. Drug Carrier Sys. 9:249-304 (1992); Francis et al., Intern. J. of Hematol. 68:1-18 (1998); U.S. Pat. No. 4,002,531; U.S. Pat. No. 5,349,052; WO 95/06058; and WO 98/32466, the disclosures of each of which are incorporated herein by reference.

[0374] One system for attaching polyethylene glycol directly to amino acid residues of proteins without an intervening linker employs tresylated MPEG, which is produced by the modification of monmethoxy polyethylene glycol (MPEG) using tresylchloride (CISO₂CH₂CF₃). Upon reaction of protein with tresylated MPEG, polyethylene glycol is directly attached to amine groups of the protein. Thus, the invention includes protein-polyethylene glycol conjugates produced by reacting proteins of the invention with a polyethylene glycol molecule having a 2,2,2-trifluoreothane sulphonyl group.

[0375] Polyethylene glycol can also be attached to proteins using a number of different intervening linkers. For example, U.S. Pat. No. 5,612,460, the entire disclosure of which is incorporated herein by reference, discloses urethane linkers for connecting polyethylene glycol to proteins. Protein-polyethylene glycol conjugates wherein the polyethylene glycol is attached to the protein by a linker can also be produced by reaction of proteins with compounds such as MPEG-succinimidylsuccinate, MPEG activated with 1,1′-carbonyldiimidazole, MPEG-2,4,5-trichloropenylcarbonate, MPEG-p-nitrophenolcarbonate, and various MPEG-succinate derivatives. A number of additional polyethylene glycol derivatives and reaction chemistries for attaching polyethylene glycol to proteins are described in International Publication No. WO 98/32466, the entire disclosure of which is incorporated herein by reference. Pegylated protein products produced using the reaction chemistries set out herein are included within the scope of the invention.

[0376] The number of polyethylene glycol moieties attached to each albumin fusion protein of the invention (i.e., the degree of substitution) may also vary. For example, the pegylated proteins of the invention may be linked, on average, to 1, 2, 3, 4, 5, 6, 7, 8, 9, 10, 11, 12, 15, 17, 20, or more polyethylene glycol molecules. Similarly, the average degree of substitution within ranges such as 1-3, 2-4, 3-5, 4-6, 5-7, 6-8, 7-9, 8-10, 9-11, 10-12, 11-13, 12-14, 13-15, 14-16, 15-17, 16-18, 17-19, or 18-20 polyethelene glycol moieties per protein molecule. Methods for determining the degree of substitution are discussed, for example, in Delgado et al., Crit. Rev. Thera. Drug Carrier Sys. 9:249-304 (1992).

[0377] The polypeptides of the invention can be recovered and purified from chemical synthesis and recombinant cell cultures by standard methods which include, but are not limited to, ammonium sulfate or ethanol precipitation, acid extraction, anion or cation exchange chromatography, phosphocellulose chromatography, hydrophobic interaction chromatography, affinity chromatography, hydroxylapatite chromatography and lectin chromatography. Most preferably, high performance liquid chromatography (“HPLC”) is employed for purification. Well known techniques for refolding protein may be employed to regenerate active conformation when the polypeptide is denatured during isolation and/or purification.

[0378] The presence and quantity of albumin fusion proteins of the invention may be determined using ELISA, a well known immunoassay known in the art. In one ELISA protocol that would be useful for detectingtquantifying albumin fusion proteins of the invention, comprises the steps of coating an ELISA plate with an anti-human serum albumin antibody, blocking the plate to prevent non-specific binding, washing the ELISA plate, adding a solution containing the albumin fusion protein of the invention (at one or more different concentrations), adding a secondary anti-Therapeutic protein specific antibody coupled to a detectable label (as described herein or otherwise known in the art), and detecting the presence of the secondary antibody. In an alternate version of this protocol, the ELISA plate might be coated with the anti-Therapeutic protein specific antibody and the labeled secondary reagent might be the anti-human albumin specific antibody.

[0379] Uses of the Polynucleotides

[0380] Each of the polynucleotides identified herein can be used in numerous ways as reagents. The following description should be considered exemplary and utilizes known techniques.

[0381] The polynucleotides of the present invention are useful to produce the albumin fusion proteins of the invention. As described in more detail below, polynucleotides of the invention (encoding albumin fusion proteins) may be used in recombinant DNA methods useful in genetic engineering to make cells, cell lines, or tissues that express the albumin fusion protein encoded by the polynucleotides encoding albumin fusion proteins of the invention.

[0382] Polynucleotides of the present invention are also useful in gene therapy. One goal of gene therapy is to insert a normal gene into an organism having a defective gene, in an effort to correct the genetic defect. The polynucleotides disclosed in the present invention offer a means of targeting such genetic defects in a highly accurate manner. Another goal is to insert a new gene that was not present in the host genome, thereby producing a new trait in the host cell. Additional non-limiting examples of gene therapy methods encompassed by the present invention are more thoroughly described elsewhere herein (see, e.g., the sections labeled “Gene Therapy”, and Examples 17 and 18).

[0383] Uses of the Polypeptides

[0384] Each of the polypeptides identified herein can be used in numerous ways. The following description should be considered exemplary and utilizes known techniques.

[0385] Albumin fusion proteins of the invention are useful to provide immunological probes for differential identification of the tissue(s) (e.g., immunohistochemistry assays such as, for example, ABC immunoperoxidase (Hsu et al., J. Histochem. Cytochem. 29:577-580 (1981)) or cell type(s) (e.g., immunocytochemistry assays).

[0386] Albumin fusion proteins can be used to assay levels of polypeptides in a biological sample using classical immunohistological methods known to those of skill in the art (e.g., see Jalkanen, et al., J. Cell. Biol. 101:976-985 (1985); Jalkanen, et al., J. Cell. Biol. 105:3087-3096 (1987)). Other methods useful for detecting protein gene expression include immunoassays, such as the enzyme linked immunosorbent assay (ELISA) and the radioimmunoassay (RIA). Suitable assay labels are known in the art and include enzyme labels, such as, glucose oxidase; radioisotopes, such as iodine (¹³¹I, ¹²⁵I, ¹²³I, ¹²¹I), carbon (¹⁴C), sulfur (³⁵S), tritium (³H), indium (^{115m}In, ^{113m}In, ¹¹²In, ¹¹¹In), and technetium (⁹⁹Tc, ^{99m}Tc), thallium (²⁰¹Ti), gallium (⁶⁸Ga, ⁶⁷Ga), palladium (¹⁰³Pd), molybdenum (⁹⁹Mo), xenon (¹³³Xe), fluorine (¹⁸F), ¹⁵³Sm, ¹⁷⁷Lu, ¹⁵⁹Gd, ¹⁴⁹Pm, ¹⁴⁰La, ¹⁷⁵Yb, ¹⁶⁶Ho, ⁹⁰Y, ⁴⁷Sc, ¹⁸⁶Re, ¹⁸⁸Re, ¹⁴²Pr, ¹⁰⁵Rh, ⁹⁷Ru; luminescent labels, such as luminol; and fluorescent labels, such as fluorescein and rhodamine, and biotin.

[0387] Albumin fusion proteins of the invention can also be detected in vivo by imaging. Labels or markers for in vivo imaging of protein include those detectable by X-radiography, nuclear magnetic resonance (NMR) or electron spin relaxtion (ESR). For X-radiography, suitable labels include radioisotopes such as-barium or cesium, which emit detectable radiation but are not overtly harmful to the subject. Suitable markers for NMR and ESR include those with a detectable characteristic spin, such as deuterium, which may be incorporated into the albumin fusion protein by labeling of nutrients given to a cell line expressing the albumin fusion protein of the invention.

[0388] An albumin fusion protein which has been labeled with an appropriate detectable imaging moiety, such as a radioisotope (for example, ¹³¹I, ¹¹²In, ^{99m}Tc, (¹³¹I, ¹²⁵I, ¹²³I, ¹²¹I), carbon (¹⁴C), sulfur (³⁵S), tritium (³H), indium (^{115m}In, ^{113m}In, ¹¹²In, ¹¹¹In), and technetium (⁹⁹Tc, ^{99m}TC), thallium (²⁰¹Ti), gallium (⁶⁸Ga, ⁶⁷Ga), palladium (¹⁰³Pd), molybdenum (⁹⁹Mo), xenon (¹³³Xe), fluorine (¹⁸F, ¹⁵³Sm, ¹⁷⁷Lu, ¹⁵⁹Gd, ¹⁴⁹Pm, 140La, ¹⁷⁵Yb, ¹⁶⁶Ho, ⁹⁰Y, ⁴⁷Sc, ¹⁸⁶Re, ¹⁸⁸Re, ¹⁴²Pr, ¹⁰⁵Rh, ⁹⁷Ru), a radio-opaque substance, or a material detectable by nuclear magnetic resonance, is introduced (for example, parenterally, subcutaneously or intraperitoneally) into the mammal to be examined for immune system disorder. It will be understood in the art that the size of the subject and the imaging system used will determine the quantity of imaging moiety needed to produce diagnostic images. In the case of a radioisotope moiety, for a human subject, the quantity of radioactivity injected will normally range from about 5 to 20 millicuries of ^{99m}Tc. The labeled albumin fusion protein will then preferentially accumulate at locations in the body (e.g., organs, cells, extracellular spaces or matrices) where one or more receptors, ligands or substrates (corresponding to that of the Therapeutic protein used to make the albumin fusion protein of the invention) are located. Alternatively, in the case where the albumin fusion protein comprises at least a fragment or variant of a Therapeutic antibody, the labeled albumin fusion protein will then preferentially accumulate at the locations in the body (e.g., organs, cells, extracellular spaces or matrices) where the polypeptides/epitopes corresponding to those bound by the Therapeutic antibody (used to make the albumin fusion protein of the invention) are located. In vivo tumor imaging is described in S. W. Burchiel et al., “Immunopharmacokinetics of Radiolabeled Antibodies and Their Fragments” (Chapter 13 in Tumor Imaging: The Radiochemical Detection of Cancer, S. W. Burchiel and B. A. Rhodes, eds., Masson Publishing Inc. (1982)). The protocols described therein could easily be modified by one of skill in the art for use with the albumin fusion proteins of the invention.

[0389] In one embodiment, the invention provides a method for the specific delivery of albumin fusion proteins of the invention to cells by administering albumin fusion proteins of the invention (e.g., polypeptides encoded by polynucleotides encoding albumin fusion proteins of the invention and/or antibodies) that are associated with heterologous polypeptides or nucleic acids. In one example, the invention provides a method for delivering a Therapeutic protein into the targeted cell. In another example, the invention provides a method for delivering a single stranded nucleic acid (e.g., antisense or ribozymes) or double stranded nucleic acid (e.g., DNA that can integrate into the cell's genome or replicate episomally and that can be transcribed) into the targeted cell.

[0390] In another embodiment, the invention provides a method for the specific destruction of cells (e.g., the destruction of tumor cells) by administering albumin fusion proteins of the invention in association with toxins or cytotoxic prodrugs.

[0391] By “toxin” is meant one or more compounds that bind and activate endogenous cytotoxic effector systems, radioisotopes, holotoxins, modified toxins, catalytic subunits of toxins, or any molecules or enzymes not normally present in or on the surface of a cell that under defined conditions cause the cell's death. Toxins that may be used according to the methods of the invention include, but are not limited to, radioisotopes known in the art, compounds such as, for example, antibodies (or complement fixing containing portions thereof) that bind an inherent or induced endogenous cytotoxic effector system, thymidine kinase, endonuclease, RNAse, alpha toxin, ricin, abrin, Pseudomonas exotoxin A, diphtheria toxin, saporin, momordin, gelonin, pokeweed antiviral protein, alpha-sarcin and cholera toxin. “Toxin” also includes a cytostatic or cytocidal agent, a therapeutic agent or a radioactive metal ion, e.g., alpha-emitters such as, for example, ²¹³Bi, or other radioisotopes such as, for example, ¹⁰³Pd, ¹³³Xe, ¹³¹I, ⁶⁸Ge, ⁵⁷Co, 65Zn, ⁸⁵Sr, ³²P, ³⁵S, ⁹⁰Y, ¹⁵³Sm, ¹⁵³Gd, ¹⁶⁹Yb, ⁵¹Cr, ⁵⁴Mn, ⁷⁵Se, ¹¹³Sn, ⁹⁰Yttrium, ¹¹⁷Tin, ¹⁸⁶Rhenium, ¹⁶⁶Holmium, and ¹⁸⁸Rhenium; luminescent labels, such as luminol; and fluorescent labels, such as fluorescein and rhodamine, and biotin. In a specific embodiment, the invention provides a method for the specific destruction of cells (e.g., the destruction of tumor cells) by administering polypeptides of the invention or antibodies of the invention in association with the radioisotope ⁹⁰Y. In another specific embodiment, the invention provides a method for the specific destruction of cells (e.g., the destruction of tumor cells) by administering polypeptides of the invention or antibodies of the invention in association with the radioisotope ¹¹¹In. In a further specific embodiment, the invention provides a method for the specific destruction of cells (e.g., the destruction of tumor cells) by administering polypeptides of the invention or antibodies of the invention in association with the radioisotope ¹³¹I.

[0392] Techniques known in the art may be applied to label polypeptides of the invention. Such techniques include, but are not limited to, the use of bifunctional conjugating agents (see e.g., U.S. Pat. Nos. 5,756,065; 5,714,631; 5,696,239; 5,652,361; 5,505,931; 5,489,425; 5,435,990; 5,428,139; 5,342,604; 5,274,119; 4,994,560; and 5,808,003; the contents of each of which are hereby incorporated by refence in its entirety).

[0393] The albumin fusion proteins of the present invention are useful for diagnosis, treatment, prevention and/or prognosis of various disorders in mammals, preferably humans. Such disorders include, but are not limited to, those described herein under the section heading “Biological Activities,” below.

[0394] Thus, the invention provides a diagnostic method of a disorder, which involves (a) assaying the expression level of a certain polypeptide in cells or body fluid of an individual using. an albumin fusion protein of the invention; and (b) comparing the assayed polypeptide expression level with a standard polypeptide expression level, whereby an increase or decrease in the assayed polypeptide expression level compared to the standard expression level is indicative of a disorder. With respect to cancer, the presence of a relatively high amount of transcript in biopsied tissue from an individual may indicate a predisposition for the development of the disease, or may provide a means for detecting the disease prior to the appearance of actual clinical symptoms. A more definitive diagnosis of this type may allow health professionals to employ preventative measures or aggressive treatment earlier thereby preventing the development or further progression of the cancer.

[0395] Moreover, albumin fusion proteins of the present invention can be used to treat or prevent diseases or conditions such as, for example, neural disorders, immune system disorders, muscular disorders, reproductive disorders, gastrointestinal disorders, pulmonary disorders, cardiovascular disorders, renal disorders, proliferative disorders, and/or cancerous diseases and conditions. For example, patients can be administered a polypeptide of the present invention in an effort to replace absent or decreased levels of the polypeptide (e.g., insulin), to supplement absent or decreased levels of a different polypeptide (e.g., hemoglobin S for hemoglobin B, SOD, catalase, DNA repair proteins), to inhibit the activity of a polypeptide (e.g., an oncogene or tumor supressor), to activate the activity of a polypeptide (e.g., by binding to a receptor), to reduce the activity of a membrane bound receptor by competing with it for free ligand (e.g., soluble TNF receptors used in reducing inflammation), or to bring about a desired response (e.g., blood vessel growth inhibition, enhancement of the immune response to proliferative cells or tissues).

[0396] In particular, albumin fusion proteins comprising of at least a fragment or variant of a Therapeutic antibody can also be used to treat disease (as described supra, and elsewhere herein). For example, administration of an albumin fusion protein comprising of at least a fragment or variant of a Therapeutic antibody can bind, and/or neutralize the polypeptide to which the Therapeutic antibody used to make the albumin fusion protein specifically binds, and/or reduce overproduction of the polypeptide to which the Therapeutic antibody used to make the albumin fusion protein specifically binds. Similarly, administration of an albumin fusion protein comprising of at least a fragment or variant of a Therapeutic antibody can activate the polypeptide to which the Therapeutic antibody used to make the albumin fusion protein specifically binds, by binding to the polypeptide bound to a membrane (receptor).

[0397] At the very least, the albumin fusion proteins of the invention of the present invention can be used as molecular weight markers on SDS-PAGE gels or on molecular sieve gel filtration columns using methods well known to those of skill in the art. Albumin fusion proteins of the invention can also be used to raise antibodies, which in turn may be used to measure protein expression of the Therapeutic protein, albumin protein, and/or the albumin fusion protein of the invention from a recombinant cell, as a way of assessing transformation of the host cell, or in a biological sample. Moreover, the albumin fusion proteins of the present invention can be used to test the biological activities described herein.

[0398] Diagnostic Assays

[0399] The compounds of the present invention are useful for diagnosis, treatment, prevention and/or prognosis of various disorders in mammals, preferably humans. Such disorders include, but are not limited to, those described for each Therapeutic protein in the corresponding row of Table 1 and herein under the section headings “Immune Activity,” “Blood Related Disorders,” “Hyperproliferative Disorders,” “Renal Disorders,” “Cardiovascular Disorders,” “Respiratory Disorders,” “Anti-Angiogenesis Activity,” “Diseases at the Cellular Level,” “Wound Healing and Epithelial Cell Proliferation,” “Neural Activity and Neurological Diseases,” “Endocrine Disorders,” “Reproductive System Disorders,” “Infectious Disease,” “Regeneration,” and/or “Gastrointestinal Disorders,” infra.

[0400] For a number of disorders, substantially altered (increased or decreased) levels of gene expression can be detected in tissues, cells or bodily fluids (e.g., sera, plasma, urine, semen, synovial fluid or spinal fluid) taken from an individual having such a disorder, relative to a “standard” gene expression level, that is, the expression level in tissues or bodily fluids from an individual not having the disorder. Thus, the invention provides a diagnostic method useful during diagnosis of a disorder, which involves measuring the expression level of the gene encoding a polypeptide in tissues, cells or body fluid from an individual and comparing the measured gene expression level with a standard gene expression level, whereby an increase or decrease in the gene expression level(s) compared to the standard is indicative of a disorder. These diagnostic assays may be performed in vivo or in vitro, such as, for example, on blood samples, biopsy tissue or autopsy tissue.

[0401] The present invention is also useful as a prognostic indicator, whereby patients exhibiting enhanced or depressed gene expression will experience a worse clinical outcome

[0402] By “assaying the expression level of the gene encoding a polypeptide” is intended qualitatively or quantitatively measuring or estimating the level of a particular polypeptide (e.g. a polypeptide corresponding to a Therapeutic protein disclosed in Table 1) or the level of the mRNA encoding the polypeptide of the invention in a first biological sample either directly (e.g., by determining or estimating absolute protein level or mRNA level) or relatively (e.g., by comparing to the polypeptide level or mRNA level in a second biological sample). Preferably, the polypeptide expression level or mRNA level in the first biological sample is measured or estimated and compared to a standard polypeptide level or mRNA level, the standard being taken from a second biological sample obtained from an individual not having the disorder or being determined by averaging levels from a population of individuals not having the disorder. As will be appreciated in the art, once a standard polypeptide level or mRNA level is known, it can be used repeatedly as a standard for comparison.

[0403] By “biological sample” is intended any biological sample obtained from an individual, cell line, tissue culture, or other source containing polypeptides of the invention (including portions thereof) or mRNA. As indicated, biological samples include body fluids (such as sera, plasma, urine, synovial fluid and spinal fluid) and tissue sources found to express the full length or fragments thereof of a polypeptide or mRNA. Methods for obtaining tissue biopsies and body fluids from mammals are well known in the ar. Where the biological sample is to include mRNA, a tissue biopsy is the preferred source.

[0404] Total cellular RNA can be isolated from a biological sample using any suitable technique such as the single-step guanidinium-thiocyanate-phenol-chloroform method described in Chomczynski and Sacchi, Anal. Biochem. 162:156-159 (1987). Levels of mRNA encoding the polypeptides of the invention are then assayed using any appropriate method. These include Northern blot analysis, S1 nuclease mapping, the polymerase chain reaction (PCR), reverse transcription in combination with the polymerase chain reaction (RT-PCR), and reverse transcription in combination with the ligase chain reaction (RT-LCR).

[0405] The present invention also relates to diagnostic assays such as quantitative and diagnostic. assays for detecting levels of polypeptides that bind to, are bound by, or associate with albumin fusion proteins of the invention, in a biological sample (e.g., cells and tissues), including determination of normal and abnormal levels of polypeptides. Thus, for instance, a diagnostic assay in accordance with the invention for detecting abnormal expression of polypeptides that bind to, are bound by, or associate with albumin fusion proteins compared to normal control tissue samples may be used to detect the presence of tumors. Assay techniques that can be used to determine levels of a polypeptide that bind to, are bound by, or associate with albumin fusion proteins of the present invention in a sample derived from a host are well-known to those of skill in the art. Such assay methods include radioimmunoassays, competitive-binding assays, Western Blot analysis and ELISA assays. Assaying polypeptide levels in a biological sample can occur using any art-known method.

[0406] Assaying polypeptide levels in a biological sample can occur using a variety of techniques. For example, polypeptide expression in tissues can be studied with classical immunohistological methods (Jalkanen et al., J. Cell. Biol. 101:976-985 (1985); Jalkanen, M., et al., J. Cell . Biol. 105:3087-3096 (1987)). Other methods useful for detecting polypeptide gene expression include immunoassays, such as the enzyme linked immunosorbent assay (ELISA) and the radioimmunoassay (RIA). Suitable antibody assay labels are known in the art and include enzyme labels, such as, glucose oxidase, and radioisotopes, such as iodine (¹²⁵I, ¹²¹I, carbon (¹⁴C), sulfur (³⁵S), tritium (³H), indium (¹¹²In), and technetium (^{99m}Tc), and fluorescent labels, such as fluorescein and rhodamine, and biotin.

[0407] The tissue or cell type to be analyzed will generally include those which are known, or suspected, to express the gene of interest (such as, for example, cancer). The protein isolation methods employed herein may, for example, be such as those described in Harlow and Lane (Harlow, E. and Lane, D., 1988, “Antibodies: A Laboratory Manual”, Cold Spring Harbor Laboratory Press, Cold Spring Harbor, N.Y.), which is incorporated herein by reference in its entirety. The isolated cells can be derived from cell culture or from a patient. The analysis of cells taken from culture may be a necessary step in the assessment of cells that could be used as part of a cell-based gene therapy technique or, alternatively, to test the effect of compounds on the expression of the gene.

[0408] For example, albumin fusion proteins may be used to quantitatively or qualitatively detect the presence of polypeptides that bind to, are bound by, or associate with albumin fusion proteins of the present invention. This can be accomplished, for example, by immunofluorescence techniques employing a fluorescently labeled albumin fusion protein coupled with light microscopic, flow cytometric, or fluorimetric detection.

[0409] In a preferred embodiment, albumin fusion proteins comprising at least a fragment or variant of an antibody that specifically binds at least a Therapeutic protein disclosed herein (e.g., the Therapeutic proteins disclosed in Table 1) or otherwise known in the art may be used to quantitatively or qualitatively detect the presence of gene products or conserved variants or peptide fragments thereof. This can be accomplished, for example, by immunofluorescence techniques employing a fluorescently labeled antibody coupled with light microscopic, flow cytometric, or fluorimetric detection.

[0410] The albumin fusion proteins of the present invention may, additionally, be employed histologically, as in immunofluorescence, immunoelectron microscopy or non-immunological assays, for in situ detection of polypeptides that bind to, are bound by, or associate with an albumin fusion protein of the present invention. In situ detection may be accomplished by removing a histological specimen from a patient, and applying thereto a labeled antibody or polypeptide of the present invention. The albumin fusion proteins are preferably applied by overlaying the labeled albumin fusion proteins onto a biological sample. Through the use of such a procedure, it is possible to determine not only the presence of the polypeptides that bind to, are bound by, or associate with albumin fusion proteins, but also its distribution in the examined tissue. Using the present invention, those of ordinary skill will readily perceive that any of a wide variety of histological methods (such as staining procedures) can be modified in order to achieve such in situ detection.

[0411] Immunoassays and non-immunoassays that detect polypeptides that bind to, are bound by, or associate with albumin fusion proteins will typically comprise incubating a sample, such as a biological fluid, a tissue extract, freshly harvested cells, or lysates of cells which have been incubated in cell culture, in the presence of a detectably labeled antibody capable of binding gene products or conserved variants or peptide fragments thereof, and detecting the bound antibody by any of a number of techniques well-known in the art.

[0412] The biological sample may be brought in contact with and immobilized onto a solid phase support or carrier such as nitrocel or other solid support which is capable of immobilizing cells, cell particles or soluble proteins. The support may then be washed with suitable buffers followed by treatment with the detectably labeled albumin fusion protein of the invention. The solid phase support may then be washed with the buffer a second time to remove unbound antibody or polypeptide. Optionally the antibody is subsequently labeled. The amount of bound label on solid support may then be detected by conventional means.

[0413] By “solid phase support or carrier” is intended any support capable of binding a polypeptide (e.g., an albumin fusion protein, or polypeptide that binds, is bound by, or associates with an albumin fusion protein of the invention.) Well-known supports or carriers include glass, polystyrene, polypropylene, polyethylene, dextran, nylon, amylases, natural and modified celluloses, polyacrylamides, gabbros, and magnetite. The nature of the carrier can be either soluble to some extent or insoluble for the purposes of the present invention. The support material may have virtually any possible structural configuration so long as the coupled molecule is capable of binding to a polypeptide. Thus, the support configuration may be spherical, as in a bead, or cylindrical, as in the inside surface of a test tube, or the external surface of a rod. Alternatively, the surface may be flat such as a sheet, test strip, etc. Preferred supports include polystyrene beads. Those skilled in the art will know many other suitable carriers for binding antibody or antigen, or will be able to ascertain the same by use of routine experimentation.

[0414] The binding activity of a given lot of albumin fusion protein may be determined according to well known methods. Those skilled in the art will be able to determine operative and optimal assay conditions for each determination by employing routine experimentation.

[0415] In addition to assaying polypeptide levels in a biological sample obtained from an individual, polypeptide can also be detected in vivo by imaging. For example, in one embodiment of the invention, albumin fusion proteins of the invention are used to image diseased or neoplastic cells.

[0416] Labels or markers for in vivo imaging of albumin fusion proteins of the invention include those detectable by X-radiography, NMR, MRI, CAT-scans or ESR. For X-radiography, suitable labels include radioisotopes such as barium or cesium, which emit detectable radiation but are not overtly harmful to the subject. Suitable markers for NMR and ESR include those with a detectable characteristic spin, such as deuterium, which may be incorporated into the albumin fusion protein by labeling of nutrients of a cell line (or bacterial or yeast strain) engineered.

[0417] Additionally, albumin fusion proteins of the invention whose presence can be detected, can be administered. For example, albumin fusion proteins of the invention labeled with a radio-opaque or other appropriate compound can be administered and visualized in vivo, as discussed, above for labeled antibodies. Further, such polypeptides can be utilized for in vitro diagnostic procedures.

[0418] A polypeptide-specific antibody or antibody fragment which has been labeled with an appropriate detectable imaging moiety, such as a radioisotope (for example, ¹³¹I, ¹¹²In, ^{99m}Tc), a radio-opaque substance, or a material detectable by nuclear magnetic resonance, is introduced (for example, parenterally, subcutaneously or intraperitoneally) into the mammal to be examined for a disorder. It will be understood in the art that the size of the subject and the imaging system used will determine the quantity of imaging moiety needed to produce diagnostic images. In the case of a radioisotope moiety, for a human subject, the quantity of radioactivity injected will normally range from about 5 to 20 millicuries of ^{99m}Tc. The labeled albumin fusion protein will then preferentially accumulate at the locations in the body which contain a polypeptide or other substance that binds to, is bound by or associates with an albumin fusion protein of the present invention. In vivo tumor imaging is described in S. W. Burchiel et al., “Immunopharmacokinetics of Radiolabeled Antibodies and Their Fragments” (Chapter 13 in Tumor Imaging: The Radiochemical Detection of Cancer, S. W. Burchiel and B. A. Rhodes, eds., Masson Publishing Inc. (1982)).

[0419] One of the ways in which an albumin fusion protein of the present invention can be detectably labeled is by linking the same to a reporter enzyme and using the linked product in an enzyme immunoassay (EIA) (Voller, A., “The Enzyme Linked Immunosorbent Assay (ELISA)”, 1978, Diagnostic Horizons 2:1-7, Microbiological Associates Quarterly Publication, Walkersville, Md.); Voller et al. J. Clin. Pathol. 31:507-520 (1978); Butler, J. E., Meth. Enzymol. 73:482-523 (1981); Maggio, E. (ed.), 1980, Enzyme Immunoassay, CRC Press, Boca Raton, Fla.; Ishikawa, E. et al., (eds.), 1981, Enzyme Immunoassay, Kgaku Shoin, Tokyo). The reporter enzyme which is bound to the antibody will react with an appropriate substrate, preferably a chromogenic substrate, in such a manner as to produce a chemical moiety which can be detected, for example, by spectrophotometric, fluorimetric or by visual means. Reporter enzymes which can be used to detectably label the antibody include, but are not limited to, malate dehydrogenase, staphylococcal nuclease, delta-5-steroid isomerase, yeast alcohol dehydrogenase, alpha-glycerophosphate, dehydrogenase, triose phosphate isomerase, horseradish peroxidase, alkaline phosphatase, asparaginase, glucose oxidase, beta-galactosidase, ribonuclease, urease, catalase, glucose-6-phosphate dehydrogenase, glucoamylase and acetylcholinesterase. Additionally, the detection can be accomplished by colorimetric methods which employ a chromogenic substrate for the reporter enzyme. Detection may also be accomplished by visual comparison of the extent of enzymatic reaction of a substrate in comparison with similarly prepared standards.

[0420] Albumin fusion proteins may also be radiolabelled and used in any of a variety of other immunoassays. For example, by radioactively labeling the albumin fusion proteins, it is possible to the use the albumin fusion proteins in a radioimmunoassay (RIA) (see, for example, Weintraub, B., Principles of Radioimmunoassays, Seventh Training Course on Radioligand Assay Techniques, The Endocrine Society, March, 1986, which is incorporated by reference herein). The radioactive isotope can be detected by means including, but not limited to, a gamma counter, a scintillation counter, or autoradiography.

[0421] It is also possible to label the albumin fusion proteins with a fluorescent compound. When the fluorescently labeled antibody is exposed to light of the proper wave length, its presence can then be detected due to fluorescence. Among the most commonly used fluorescent labeling compounds are fluorescein isothiocyanate, rhodamine, phycoerythrin, phycocyanin, allophycocyanin, ophthaldehyde and fluorescamine.

[0422] The albumin fusion protein can also be detectably labeled using fluorescence emitting metals such as ¹⁵²Eu, or others of the lanthanide series. These metals can be attached to the antibody using such metal chelating groups as diethylenetriaminepentacetic acid (DTPA) or ethylenediaminetetraacetic acid (EDTA).

[0423] The albumin fusion proteins can also can be detectably labeled by coupling it to a chemiluminescent compound. The presence of the chemiluminescent-tagged albumin fusion protein is then determined by detecting the presence of luminescence that arises during the course of a chemical reaction. Examples of particularly useful chemiluminescent labeling compounds are luminol, isoluminol, theromatic acridinium ester, imidazole, acridinium salt and oxalate ester.

[0424] Likewise, a bioluminescent compound may be used to label albumin fusion proteins of the present invention. Bioluminescence is a type of chemiluminescence found in biological systems in, which a catalytic protein increases the efficiency of the chemiluminescent reaction. The presence of a bioluminescent protein is determined by detecting the presence of luminescence. Important bioluminescent compounds for purposes of labeling are luciferin, luciferase and aequorin.

[0425] Transeenic Oreanisms

[0426] Transgenic organisms that express the albumin fusion proteins of the invention are also included in the invention. Transgenic organisms are genetically modified organisms into which recombinant, exogenous or cloned genetic material has been transferred. Such genetic material is often referred to as a transgene. The nucleic acid sequence of the transgene may include one or more transcriptional regulatory sequences and other nucleic acid sequences such as introns, that may be necessary for optimal expression and secretion of the encoded protein. The transgene may be designed to direct the expression of the encoded protein in a manner that facilitates its recovery from the organism or from a product produced by the organism, e.g. from the milk, blood, urine, eggs, hair or seeds of the organism. The transgene may consist of nucleic acid sequences derived from the genome of the same species or of a different species than the species of the target animal. The transgene may be integrated either at a locus of a genome where that particular nucleic acid sequence is not otherwise normally found or at the normal locus for the transgene.

[0427] The term “germ cell line transgenic organism” refers to a transgenic organism in which the genetic alteration or genetic information was introduced into a germ line cell, thereby conferring the ability of the transgenic organism to transfer the genetic information to offspring. If such offspring in fact possess some or all of that alteration or genetic information, then they too are transgenic organisms. The alteration or genetic information may be foreign to the species of organism to which the recipient belongs, foreign only to the particular individual recipient, or may be genetic information already possessed by the recipient. In the last case, the altered or introduced gene may be expressed differently than the native gene.

[0428] A transgenic organism may be a transgenic animal or a transgenic plant. Transgenic animals can be produced by a variety of different methods including transfection, electroporation, microinjection, gene targeting in embryonic stem cells and recombinant viral and retroviral infection (see, e.g., U.S. Pat. No. 4,736,866; U.S. Pat. No. 5,602,307; Mullins et al. (1993) Hypertension 22(4):630-633; Brenin et al. (1997) Surg. Oncol. 6(2)99-110; Tuan (ed.), Recombinant Gene Expression Protocols, Methods in Molecular Biology No. 62, Humana Press (1997)). The method of introduction of nucleic acid fragments into recombination competent mammalian cells can be by any method which favors co-transformation of multiple nucleic acid molecules. Detailed procedures for producing transgenic animals are readily available to one skilled in the art, including the disclosures in U.S. Pat. No. 5,489,743 and U.S. Pat. No. 5,602,307.

[0429] A number of recombinant or transgenic mice have been produced, including those which express an activated oncogene sequence (U.S. Pat. No. 4,736,866); express simian SV40 T-antigen (U.S. Pat. No. 5,728,915); lack the expression of interferon regulatory factor 1 (IRF-1) (U.S. Pat. No. 5,731,490); exhibit dopaminergic dysfunction (U.S. Pat. No. 5,723,719); express at least one human gene which participates in blood pressure control (U.S. Pat. No. 5,731,489); display greater similarity to the conditions existing in naturally occurring Alzheimer's disease (U.S. Pat. No. 5,720,936); have a reduced capacity to mediate cellular adhesion (U.S. Pat. No. 5,602,307); possess a bovine growth hormone gene (Clutter et al. (1996) Genetics 143(4): 1753-1760); or, are capable of generating a fully human antibody response (McCarthy (1997). The Lancet 349(9049):405).

[0430] While mice and rats remain the animals of choice for most transgenic experimentation, in some instances it is preferable or even necessary to use alternative animal species. Transgenic procedures have been successfully utilized in a variety of non-murine animals, including sheep, goats, pigs, dogs, cats, monkeys, chimpanzees, hamsters, rabbits, cows and guinea pigs (see, e.g., Kim et al. (1997) Mol. Reprod. Dev. 46(4):515-526; Houdebine (1995) Reprod. Nutr. Dev. 35(6):609-617; Petters (1994) Reprod. Fertil. Dev. 6(5):643-645; Schnieke et al. (1997) Science 278(5346):2130-2133; and Amoah (1997) J. Animal Science 75(2):578-585).

[0431] To direct the secretion of the transgene-encoded protein of the invention into the milk of transgenic mammals, it may be put under the control of a promoter that is preferentially activated in mammary epithelial cells. Promoters that control the genes encoding milk proteins are preferred, for example the promoter for casein, beta lactoglobulin, whey acid protein, or lactalbumin (see, e.g., DiTullio (1992) BioTechnology 10:74-77; Clark et al. (1989) BioTechnology 7:487-492; Gorton et al. (1987) BioTechnology 5:1183-1187; and Soulier et al. (1992) FEBS Letts. 297:13). The transgenic mammals of choice would produce large volumes of milk and have long lactating periods, for example goats, cows, camels or sheep.

[0432] An albumin fusion protein of the invention can also be expressed in a transgenic plant, e.g. a plant in which the DNA transgene is inserted into the nuclear or plastidic genome. Plant transformation procedures used to introduce foreign nucleic acids into plant cells or protoplasts are known in the art (e.g., see Example 19). See, in general, Methods in Enzymology Vol. 153 (“Recombinant DNA Part D”) 1987, Wu and Grossman Eds., Academic Press and European Patent Application EP 693554. Methods for generation of genetically engineered plants are further described in U.S. Pat. No. 5,283,184, U.S. Pat. No. 5,482,852, and European Patent Application EP 693 554, all of which are hereby incorporated by reference.

[0433] Pharnaceutical or Therapeutic Compositions

[0434] The albumin fusion proteins of the invention or formulations thereof may be administered by any conventional method including parenteral (e.g. subcutaneous or intramuscular) injection or intravenous infusion. The treatment may consist of a single dose or a plurality of doses over a period of time.

[0435] While it is possible for an albumin fusion protein of the invention to be administered alone, it is preferable to present it as a pharmaceutical formulation, together with one or more acceptable carriers. The carrier(s) must be “acceptable” in the sense of being compatible with the albumin fusion protein and not deleterious to the recipients thereof. Typically, the carriers will be water or saline which will be sterile and pyrogen free. Albumin fusion proteins of the invention are particularly well suited to formulation in aqueous carriers such as sterile pyrogen free water, saline or other isotonic solutions because of their extended shelf-life in solution. For instance, pharmaceutical compositions of the invention may be formulated well in advance in aqueous form, for instance, weeks or months or longer time periods before being dispensed.

[0436] For example, wherein the Therapeutic protein is hGH, EPO, alpha-IFN or beta-IFN, formulations containing the albumin fusion protein may be prepared taking into account the extended shelf-life of the albumin fusion protein in aqueous formulations. As exhibited in Table 2; most Therapeutic proteins are unstable with short shelf-lives after formulation with an aqueous carrier. As discussed above, the shelf-life of many of these Therapeutic proteins are markedly increased or prolonged after fusion to HA.

TABLE 2

| | Tradename, | | | Storage Conditions of Non- |
|---|---|---|---|---|
| Protein | Manufacturer | Route | Formulation | Fusion Protein. |
| Interferon, alpha-2a | Roferon-A, | sc | sol'n | 4-8° C. |
| | Hoffmann-LaRoche | im | (vial or pre-filled syringe) | |
| Interferon, alpha-2b | Intron-A, | iv sc im | sol'n; | 4-8° C. |
| | Schering Plough | | powder + dil. | (all preps, before and after |
| | | | | dilution) |
| COMBO | Rebetron (Intron-A + | po + sc | Rebetol capsule + Intron- | |
| Interferon alpha-2b + Ribavirin | Rebetol) | | | |
| | Schering Plough | | A injection | |
| Interferon, | Infergen | sc | sol'n | 4-8° C. |
| Alphacon-1 | Amgen | | | |
| Interferon, | Wellferon, | sc | sol'n | 4-8° C. |
| alpha-n1, Lymphoblastoid | Wellcome | im | (with albumin “as stablizer”) | |
| Interferon, | Avonex, | im | powder + dil. | 4-8° C. |
| beta-1a | Biogen | | (with albumin) | (before and after dilution) |
| | | | | (Use within 3-6 h of |
| | | | | reconstitution) |
| | Rebif, | sc | sol'n, | |
| | Ares-Serono (Europe | | in pre-filled syringe | |
| | only) | | | |
| Interferon, | Betaseron, | sc | powder + dil. | 4-8° C. |
| beta-1b | Chiron | | (with albumin) | (before and after dilution) |
| | (Europe: Betaferon) | | | (Use within 3 h of reconstitution) |
| | | | | Single use vials. |
| Interferon, | Actimmune, | sc | | 4-8° C. |
| Gamma-1b | InterMune | | | (before and after dilution) |
| | Pharmaceuticals | | | (Use within 3 h of |
| | | | | reconstitution). |
| Growth Hormone | Genotropin, | | powder/dil cartridges (single or | 4-8° C. |
| (somatropin) | Pharmacia Upjohn | | multi-use); | (before and after dilution); |
| | | | single use MiniQuick injector | single use MiniQuick Delivery |
| | | | | Device should be refrigerated |
| | | | | until use. |
| | Humatrope, | sc | powder + dil. | 4-8° C. |
| | Eli Lilly | im | (Vial or pen cartridge) | (before and after dilution) |
| | | | | (Use vials within 25 h, cartridges |
| | | | | within 28 d, of reconstitution). |
| | Norditropin, | | | |
| | Novo Nordisk | | | |
| | Pharmaceuticals | | | |
| | Nutropin, | sc | powder + dil. | 4-8° C. |
| | Genentech | | | (stable for 14 d after dil□n) |
| | | | | (all preps, before and after |
| | | | | dilution) |
| | Nutropin AQ, | sc | sol'n | 4-8° C. |
| | Genentech | | | (Stable for 28 d after 1st use) |
| | Nutropin Depot, | sc | microsphere suspension as | 4-8° C. |
| | Genentech | | powder + dil. | Single use pkges. Dose 1-2x/ |
| | | | | month (ProLease micro- |
| | | | | encapsulation technol.) |
| | Saizen, | sc | powder + dil. | Powder “should be stored at Rm |
| | (Serono) | im | | Temp”. After reconstitution |
| | | | | store 4-8° C. for up to 14 d. |
| | Serostim, | | | Powder “should be stored at Rm |
| | Serono | | | Temp”. After reconstitution |
| | | | | store in 4-8° C. for up to 14 d. |
| hGH, with | Protropin, | sc | powder + dil. | 4-8° C. |
| N-term. Met | Genentech | im | | (all preps, before and after |
| (somatrem) | | | | dilution) |
| Erythropoietin | Epogen, | iv | sol'n | 4-8° C. |
| (Epoetin alfa) | Amgen | sc | | (use within 21 d of first use) |
| | | | | (Single & multi-dose vials) |
| | Procrit, | iv | sol'n | 4-8° C. |
| | Amgen | sc | | (use within 21 d of first use) |
| | | | | (Single & multi-dose vials) |

[0437] In instances where aerosol administration is appropriate, the albumin fusion proteins of the invention can be formulated as aerosols using standard procedures. The term “aerosol” includes any gas-borne suspended phase of an albumin fusion protein of the instant invention which is capable of being inhaled into the bronchioles or nasal passages. Specifically, aerosol includes a gas-borne suspension of droplets of an albumin fusion protein of the instant invention, as may be produced in a metered dose inhaler or nebulizer, or in a mist sprayer. Aerosol also includes a dry powder composition of a compound of the instant invention suspended in air or other carrier gas, which may be delivered by insufflation from an inhaler device, for example. See Ganderton & Jones, Drug Delivery to the Respiratory Tract, Ellis Horwood (1987); Gonda (1990) Critical Reviews in Therapeutic Drug Carrier Systems 6:273-313; and Raebum et al,. (1992) Pharmacol. Toxicol. Methods 27:143-159.

[0438] The formulations of the invention are also typically non-immunogenic, in part, because of the use of the components of the albumin fusion protein being derived from the proper species. For instance, for human use, both the Therapeutic protein and albumin portions of the albumin fusion protein will typically be human. In some cases, wherein either component is non human-derived, that component may be humanized by substitution of key amino acids so that specific epitopes appear to the human immune system to be human in nature rather than foreign.

[0439] The formulations may conveniently be presented in unit dosage form and may be prepared by any of the methods well known in the an of pharmacy. Such methods include the step of bringing into association the albumin fusion protein with the carrier that constitutes one or more accessory ingredients. In general the formulations are prepared by uniformly and intimately bringing into association the active ingredient with liquid carriers or finely divided solid carriers or both, and then, if necessary, shaping the product.

[0440] Formulations suitable for parenteral administration include aqueous and non-aqueous sterile injection solutions which may contain anti-oxidants, buffers, bacteriostats and solutes which render the formulation appropriate for the intended recipient; and aqueous and non-aqueous sterile suspensions which may include suspending agents and thickening agents. The formulations may be presented in unit-dose or multi-dose containers, for example sealed ampules, vials or syringes, and may be stored in a freeze-dried (Iyophilised) condition requiring only the addition of the sterile liquid carrier, for example water for injections, immediately prior to use. Extemporaneous injection solutions and suspensions may be prepared from sterile powders. Dosage formulations may contain the Therapeutic protein portion at a lower molar concentration or lower dosage compared to the non-fused standard formulation for the Therapeutic protein given the extended serum half-life exhibited by many of the albumin fusion proteins of the invention.

[0441] As an example, when an albumin fusion protein of the invention comprises growth hormone as one or more of the Therapeutic protein regions, the dosage form can be calculated on the basis of the potency of the albumin fusion protein relative to the potency of hGH, while taking into account the prolonged serum half-life and shelf-life of the albumin fusion proteins compared to that of native hGH. Growth hormone is typically administered at 0.3 to 30.0 IU/kg/week, for example 0.9 to 12.0 IU/kglweek, given in three or seven divided doses for a year or more. In an albumin fusion protein consisting of full length HA fused to full length GH, an equivalent dose in terms of units would represent a greater weight of agent but the dosage frequency can be reduced, for example to.twice a week, once a week or less.

[0442] Formulations or compositions of the invention may be packaged together with, or included in a kit with, instructions or a package insert referring to the extended shelf-life of the albumin fusion protein component. For instance, such instructions or package inserts may address recommended storage conditions, such as time, temperature and light, taking into account the extended or prolonged shelf-life of the albumin fusion proteins of the invention. Such instructions or package inserts may also address the particular advantages of the albumin fusion proteins of the inventions, such as the ease of storage for formulations that may require use in the field, outside of controlled hospital, clinic or office conditions. As described above, formulations of the invention may be in aqueous form and may be stored under less than ideal circumstances without significant loss of therapeutic activity.

[0443] Albumin fusion proteins of the invention can also be included in nutraceuticals. For instance, certain albumin fusion proteins of the invention may be administered in natural products, including milk or milk product obtained from a transgenic mammal which expresses albumin fusion protein. Such compositions can also include plant or plant products obtained from a transgenic plant which expresses the albumin fusion protein. The albumin fusion protein can also be provided in powder or tablet form, with or without other known additives, carriers, fillers and diluents. Nutraceuticals are described in Scott Hegenhart, Food Product Design, December 1993.

[0444] The invention also provides methods of treatment and/or prevention of diseases or disorders (such as, for example, any one or more of the diseases or disorders disclosed herein) by administration to a subject of an effective amount of an albumin fusion protein of the invention or a polynucleotide encoding an albumin fusion protein of the invention (“albumin fusion polynucleotide”) in a pharmaceutically acceptable carrier.

[0445] The albumin fusion protein and/or polynucleotide will be formulated and dosed in a fashion consistent with good medical practice, taking into account the clinical condition of the individual patient (especially the side effects of treatment with the albumin fusion protein and/or polynucleotide alone), the site of delivery, the method of administration, the scheduling of administration, and other factors known to practitioners. The “effective amount” for purposes herein is thus determined by such considerations.

[0446] As a general proposition, the total pharmaceutically effective amount of the albumin fusion protein administered parenterally per dose will be in the range of about 1 ug/kg/day to 10 mg/kg/day of patient body weight, although, as noted above, this will be subject to therapeutic discretion. More preferably, this dose is at least 0.01 mg/kg/day, and most preferably for humans between about 0.01 and 1 mg/kg/day for the hormone. If given continuously, the albumin fusion protein is typically administered at a dose rate of about 1 ug/kg/hour to about 50 ug/kg/hour, either by 1-4 injections per day or by continuous subcutaneous infusions, for example, using a mini-pump. An intravenous bag solution may also be employed. The length of treatment needed to observe changes and the interval following treatment for responses to occur appears to vary depending on the desired effect.

[0447] Albumin fusion proteins and/or polynucleotides can be are administered orally, rectally, parenterally, intracisternaly, intravaginally, intraperitoneally, topically (as by powders, ointments, gels, drops or transdermal patch), bucaly, or as an oral or nasal spray. “Pharmaceutically acceptable carrier” refers to a non-toxic solid, semisolid or liquid filler, diluent, encapsulating material or formulation auxiliary of any. The term “parenteral” as used herein refers to modes of administration which include intravenous, intramuscular, intraperitoneal, intrasternal, subcutaneous and intraarticular injection and infusion.

[0448] Albumin fusion proteins and/or polynucleotides of the invention are also suitably administered by sustained-release systems. Examples of sustained-release albumin fusion proteins and/or polynucleotides are administered orally, rectally, parenterally, intracisternally, intravaginally, intraperitoneally, topically (as by powders, ointments, gels, drops or transdermal patch), bucally, or as an oral or nasal spray. “Pharmaceutically acceptable carrier” refers to a non-toxic solid, semisolid or liquid ftier, diluent, encapsulating material or formulation auxiliary of any type. The term “parenteral” as used herein refers to modes of administration which include intravenous, intramuscular, intraperitoneal, intrasternal, subcutaneous and intraarticular injection and infusion. Additional examples of sustained-release albumin fusion proteins and/or polynucleotides include suitable polymeric materials (such as, for example, semi-permeable polymer matrices in the form of shaped articles, e.g., films, or microcapsules), suitable hydrophobic materials (for example as an emulsion in an acceptable oil) or ion exchange resins, and sparingly soluble derivatives (such as, for example, a sparingly soluble salt).

[0449] Sustained-release matrices include polylactides (U.S. Pat. No. 3,773,919, EP 58,481), copolymers of L-glutamic acid and gamma-ethyl-L-glutamate (Sidman et al., Biopolymers 22:547-556 (1983)), poly (2-hydroxyethyl methacrylate) (Langer et al., J. Biomed. Mater. Res. 15:167-277 (1981), and Langer, Chem. Tech. 12:98-105 (1982)), ethylene vinyl acetate (Langer et al., Id.) or poly-D-(−)-3-hydroxybutyric acid (EP 133,988).

[0450] Sustained-release albumin fusion proteins and/or polynucleotides also include liposomally entrapped albumin fusion proteins and/or polynucleotides of the invention (see generally, Langer, Science 249:1527-1533 (1990); Treat et al., in Liposomes in the Therapy of Infectious Disease and Cancer, Lopez-Berestein and Fidler (eds.), Liss, New York, pp. 317 -327 and 353-365 (1989). Liposomes containing the albumin fusion protein and/or polynucleotide are prepared by methods known per se: DE 3,218,121; Epstein et al., Proc. Natl. Acad. Sci. (USA) 82:3688-3692 (1985); Hwang et al., Proc. Natl. Acad. Sci.(USA) 77:40304034 (1980); EP 52,322; EP 36,676; EP 88,046; EP 143,949; EP 142,641; Japanese Pat. Appl. 83-118008; U.S. Pat. Nos. 4,485,045 and 4,544,545; and EP 102,324. Ordinarily, the liposomes are of the small (about 200-800 Angstroms) unilameliar type in which the lipid content is greater than about 30 mol. percent cholesterol, the selected proportion being adjusted for the optimal Therapeutic.

[0451] In yet an additional embodiment, the albumin fusion proteins and/or polynucleotides of the invention are delivered by way of a pump (see Langer, supra; Sefton, CRC Crit. Ref. Biomed. Eng. 14:201 (1987); Buchwald et al., Surgery 88:507 (1980); Saudek et al., N. Engl. J. Med. 321:574 (1989)).

[0452] Other controlled release systems are discussed in the review by Langer (Science 249:1527-1533 (1990)).

[0453] For parenteral administration, in one embodiment, the albumin fusion protein and/or polynucleotide is formulated generally by mixing it at the. desired degree of purity, in a unit dosage injectable form (solution, suspension, or emulsion), with a pharmaceutically acceptable carrier, i.e., one that is non-toxic to recipients at the dosages and concentrations employed and is compatible with other ingredients of the formulation. For example, the formulation preferably does not include oxidizing agents and other compounds that are known to be deleterious to the Therapeutic.

[0454] Generally, the formulations are prepared by contacting the albumin fusion protein and/or polynucleotide uniformly and intimately with liquid carriers or finely divided solid carriers or both. Then, if necessary, the product is shaped into the desired formulation. Preferably the carrier is a parenteral carrier, more preferably a solution that is isotonic with the blood of the recipient. Examples of such carrier vehicles include water, saline, Ringer's solution, and dextrose solution. Non-aqueous vehicles such as fixed oils and ethyl oleate are also useful herein, as well as liposomes.

[0455] The carrier suitably contains minor amounts of additives such as substances that enhance isotonicity and chemical stability. Such materials are non-toxic to recipients at the dosages and concentrations employed, and include buffers such as phosphate, citrate, succinate, acetic acid, and other organic acids or their salts; antioxidants such as ascorbic acid; low molecular weight (less than about ten residues) polypeptides, e.g., polyarginine or tripeptides; proteins, such as serum albumin, gelatin, or immunoglobulins; hydrophilic polymers such as polyvinylpyrrolidone; amino acids, such as glycine, glutamic acid, aspartic acid, or arginine; monosaccharides, disaccharides, and other carbohydrates including cellulose or its derivatives, glucose, manose, or dextrins; chelating agents such as EDTA; sugar alcohols such as mannitol or sorbitol; counterions such as sodium; and/or nonionic surfactants such as polysorbates, poloxamers, or PEG.

[0456] The albumin fusion protein is typically formulated in such vehicles at a concentration of about 0.1 mg/ml to 100 mg/ml, preferably 1-10 mg/ml, at a pH of about 3 to 8. It will be understood that the use of certain of the foregoing excipients, carriers, or stabilizers will result in the formation of polypeptide salts.

[0457] Any pharmaceutical used for therapeutic administration can be sterile. Sterility is readily accomplished by filtration through sterile filtration membranes (e.g., 0.2 micron membranes). Albumin fusion proteins and/or polynucleotides generally are placed into a container having a sterile access port, for example, an intravenous solution bag or vial having a stopper pierceable by a hypodermic injection needle.

[0458] Albumin fusion proteins. and/or polynucleotides ordinarily will. be stored in unit or multi-dose containers, for example, sealed ampoules or vials, as an aqueous solution or as a lyophilized formulation for reconstitution. As an example of a lyophilized formulation, 10-ml vials are filled with 5 ml of sterile-filtered 1% (w/v) aqueous albumin fusion protein and/or polynucleotide solution, and the resulting mixture is lyophilized. The infusion solution is prepared by reconstituting the lyophilized albumin fusion protein and/or polynucleotide using bacteriostatic Water-for-Injection.

[0459] In a specific and preferred embodiment, the Albumin fusion protein formulations comprises 0.01 M sodium phosphate, 0.15 mM sodium chloride, 0.16 micromole sodium octanoate/milligram of fusion protein, 15 micrograms/milliliter polysorbate 80, pH 7.2. In another specific and preferred embodiment, the Albumin fusion protein formulations consists 0.01 M sodium phosphate, 0.15 mM sodium chloride, 0.16 micromole sodium octanoate/milligram of fusion protein, 15 micrograms/milliliter polysorbate 80, pH 7.2. The pH and buffer are chosen to match physiological conditions and the salt is added as a tonicifier. Sodium octanoate has been chosen due to its reported ability to increase the thermal stability of the protein in solution. Finally, polysorbate has been added as a generic surfactant, which lowers the surface tension of the solution and lowers non-specific adsorption of the albumin fusion protein to the container closure system.

[0460] The invention also provides a pharmaceutical pack or kit comprising one or more containers filled with one or more of the ingredients of the albumin fusion proteins and/or polynucleotides of the invention. Associated with such container(s) can be a notice in the form prescribed by a governmental agency regulating the manufacture, use or sale of pharmaceuticals or biological products, which notice reflects approval by the agency of manufacture, use or sale for human administration. In addition, the albumin fusion proteins and/or polynucleotides may be employed in conjunction with other therapeutic compounds.

[0461] The albumin fusion proteins and/or polynucleotides of the invention may be administered alone or in combination with adjuvants. Adjuvants that may be administered with the albumin fusion proteins and/or polynucleotides of the invention include, but are not limited to, alum, alum plus deoxycholate (ImmunoAg), MTP-PE (Biocine Corp.), QS21 (Genentech, Inc.), BCG (e.g., THERACYS®), MPL and nonviable preparations of Corynebacterium parvum. In a specific embodiment, albumin fusion proteins and/or polynucleotides of the invention are administered in combination with alum. In another specific embodiment, albumin fusion proteins and/or polynucleotides of the invention are administered in combination with QS-21. Further adjuvants that may be administered with the albumin fusion proteins and/or polynucleotides of the invention include, but are not limited to, Monophosphoryl lipid immunomodulator, AdjuVax 100a, QS-21, QS-18, CRL1005, Aluminum salts, MF-59, and Virosomal adjuvant technology. Vaccines that may be administered with the albumin fusion proteins and/or polynucleotides of the invention include, but are not limited to, vaccines directed toward protection against MMR (measles, mumps, rubella), polio, varicella, tetanus/diptheria, hepatitis A, hepatitis B, Haemophilus influenzae B, whooping cough, pneumonia, influenza, Lyme's Disease, rotavirus, cholera, yellow fever, Japanese encephalitis, poliomyelitis, rabies, typhoid fever, and pertussis. Combinations may be administered either concomitantly, e.g., as an admixture, separately but simultaneously or concurrently; or sequentially. This includes presentations in which the combined agents are administered together as a therapeutic mixture, and also procedures in which the combined agents are administered separately but simultaneously, e.g., as through separate intravenous lines into the same individual. Administration “in combination” further includes the separate administration of one of the compounds or agents given first, followed by the second.

[0462] The albumin fusion proteins and/or polynucleotides of the invention may be administered alone or in combination with other therapeutic agents. Albumin fusion protein and/or polynucleotide agents that may be administered in combination with the albumin fusion proteins and/or polynucleotides of the invention, include but not limited to, chemotherapeutic agents, antibiotics, steroidal and non-steroidal anti-inflammatories, conventional immunotherapeutic agents, and/or therapeutic treatments described below. Combinations may be administered either concomitantly, e.g., as an admixture, separately but simultaneously or concurrently; or sequentially. This includes presentations in which the combined agents are administered together as a therapeutic mixture, and also procedures in which the combined agents are administered separately but simultaneously, e.g., as through separate intravenous lines into the same individual. Administration “in combination” further includes the separate administration of one of the compounds or agents given first, followed by the second.

[0463] In one embodiment, the albumin fusion proteins and/or polynucleotides of the invention are administered in combination with an anticoagulant. Anticoagulants that may be administered with the compositions of the invention include, but are not limited to, heparin, low molecular weight heparin, warfarin sodium (e.g., COUMADIN®), dicumarol, 4-hydroxycoumarin, anisindione (e.g., MIRADON™), acenocoumarol (e.g., nicoumalone, SINTHROME™), indan-1,3-dione, phenprocoumon (e.g., MARCUMAR™), ethyl biscoumacetate (e.g., TROMEXAN™), and aspirin. In a specific embodiment, compositions of the invention are administered in combination with heparin and/or warfarin. In another specific embodiment, compositions of the invention are administered in combination with warfarin. In another specific embodiment, compositions of the invention are administered in combination with warfarin and aspirin. In another specific embodiment, compositions of the invention are administered in combination with heparin. In another specific embodiment, compositions of the invention are administered in combination with heparin and aspirin.

[0464] In another embodiment, the albumin fusion proteins and/or polynucleotides of the invention are administered in combination with thrombolytic drugs. Thrombolytic drugs that may be administered with the compositions of the invention include, but are not limited to, plasminogen, lys-plasminogen, alpha2-antiplasmin, streptokinae (e.g., KABIKINASE™), antiresplace (e.g., EMINASE™), tissue plasminogen activator (t-PA, altevase, ACTIVASE™), urokinase (e.g., ABBOKINASE™), sauruplase, (Prourokinase, single chain urokinase), and aminocaproic acid (e.g., AMICAR™). In a specific embodiment, compositions of the invention are administered in combination with tissue plasminogen activator and aspirin.

[0465] In another embodiment, the albumin fusion proteins and/or polynucleotides of the invention are administered in combination with antiplatelet drugs. Antiplatelet drugs that may be administered with the compositions of the invention include, but are not limited to, aspirin, dipyridamole (e.g., PERSANTINE™), and ticlopidine (e.g., TICLID™).

[0466] In specific embodiments, the use of anti-coagulants, thrombolytic and/or antiplatelet drugs in combination with albumin fusion proteins and/or polynucleotides of the invention is contemplated for the prevention, diagnosis, and/or treatment of thrombosis, arterial thrombosis, venous thrombosis, thromboembolism, pulmonary embolism, atherosclerosis, myocardial infarction, transient ischemic attack, unstable angina. In specific embodiments, the use of anticoagulants, thrombolytic drugs and/or antiplatelet drugs in combination with albumin fusion proteins and/or polynucleotides of the invention is contemplated for the prevention of occulsion of saphenous grafts, for reducing the risk of periprocedural thrombosis as might accompany angioplasty procedures, for reducing the risk of stroke in patients with atrial fibrillation including nonrheumatic atrial fibrillation, for reducing the risk of embolism associated with mechanical heart valves and or mitral valves disease. Other uses for the therapeutics of the invention, alone or in combination with antiplatelet, anticoagulant, and/or thrombolytic drugs, include, but are not limited to, the prevention of occlusions in extracorporeal devices (e.g., intravascular canulas, vascular access shunts in hemodialysis patients, hemodialysis machines, and cardiopulmonary bypass machines).

[0467] In certain embodiments, albumin fusion proteins and/or polynucleotides of the invention are administered in combination with antiretroviral agents, nucleoside/nucleotide reverse transcriptase inhibitors (NRTIs), non-nucleoside reverse transcriptase inhibitors (NNRTIs), and/or protease inhibitors (Pis). NRTIs that may be administered in combination with the albumin fusion proteins and/or polynucleotides of the invention, include, but are not limited to, RETROVIR™ (zidovudine/AZT), VIDEXTM (didanosine/ddI), HIVID™ (zalcitabine/ddC), ZERIT™ (stavudine/d4T), EPWVIR™ (lamivudine/3TC), and COMBIVIR™ (zidowudine/lamivudine). NNRTIs that may be administered in combination with the albumin fusion proteins and/or polynucleotides of the invention, include, but are not limited to, VIRAMUNE™ (nevirapine), RESCRIPTOR™ (delavirdine), and SUSTIVA™ (efavirenz). Protease inhibitors that may be administered in combination with the albumin fusion proteins and/or polynucleotides of the invention, include, but are not limited to, CRIXIVAN™ (indinavir), NORVIR™ (ritonavir), INVIRASE™ (saquinavir), and VIRACEPT™ (nelfinavir). In a specific embodiment, antiretroviral agents, nucleoside reverse transcriptase inhibitors, non-nucleoside reverse transcriptase inhibitors, and/or protease inhibitors may be used in any combination with albumin fusion proteins and/or polynucleotides of the invention to treat AIDS and/or to prevent or treat HIV infection.

[0468] Additional NRTIs include LODENOSINE™ (F-ddA; an acid-stable adenosine NRTI; Triangle/Abbott; COVIRACIL™ (emtricitabine/FrC; structurally related to lamivudine (3TC) but with 3- to 10-fold greater activity in vitro; Triangle/Abbott); dOTC (BCH-10652, also structurally related to lamivudine but retains activity against a substantial proportion of lamivudine-resistant isolates; Biochem Pharma); Adefovir (refused approval for anti-HIV therapy by FDA; Gilead Sciences); PREVEON® (Adefovir Dipivoxil, the active prodrug of adefovir; its active form is PMEA-pp); TENOFOVIR™ (bis-POC PMPA, a PMPA prodrug; Gilead); DAPD/DXG (active metabolite of DAPD; Triangle/Abbott); D-D4FC (related to 3TC, with activity against AZT/3TC-resistant virus); GW420867X (Glaxo Wellcome); ZIAGEN™ (abacavir/159U89; Glaxo Wellcome Inc.); CS-87 (3′azido-2′,3′-dideoxyuridine; WO 99/66936); a S-acyl-2-thioethyl (SATE)-bearing prodrug forms of β-L-FD4C and β-L-FddC (WO 98/17281).

[0469] Additional NNRTIs include COACTINON™ (Emivirine/MKC442, potent NNRTI of the HEPT class; Triangle/Abbott); CAPRAVIRINE™ (AG-1549/S-1153, a next generation NNRTI with activity against viruses containing the K103N mutation; Agouron); PNU-142721 (has 20- to 50-fold greater activity than its predecessor delavirdine and is active against K103N mutants; Pharmacia & Upjohn); DPC-961 and DPC-963 (second-generation derivatives of efavirenz, designed to be active against viruses with the K103N mutation; DuPont); GW420867X (has 25-fold greater activity than HBY097 and is active against K103N mutants; Glaxo Wellcome); CALANOLIDE A (naturally occurring agent from the latex tree; active against viruses containing either or both the Y181C and K103N mutations); and Propolis (WO 99/49830).

[0470] Additional protease inhibitors include LOPINAVIRTM (ABT378/r; Abbott Laboratories); BMS-232632 (an azapeptide; Bristol-Myres Squibb); TIPRANAVIR™ (PNU-140690, a non-peptic dihydropyrone; Pharmacia & Upjohn); PD-178390 (a nonpeptidic dihydropyrone; Parke-Davis); BMS 232632 (an azapeptide; Bristol-Myers Squibb); L-756,423 (an indinavir analog; Merck); DMP450 (a cyclic urea compound; Avid & DuPont); AG-1776 (a peptidomimetic with in vitro activity against protease inhibitor-resistant viruses; Agouron); VX-175/GW433908 (phosphate prodrug of anprenavir; Vertex & Glaxo Welcome); CGP61755 (Ciba); and AGENERASE™ (amprenavir; Glaxo Wellcome Inc.).

[0471] Additional antiretroviral agents include fusion inhibitors/gp41 binders. Fusion inhibitors/gp41 binders include T-20 (a peptide from residues 643-678 of the HIV gp41 transmembrane protein ectodomain which binds to gp41 in its resting state and prevents transformation to the fusogenic state; Trimeris) and T-1249 (a second-generation fusion inhibitor; Trimeris).

[0472] Additional antiretroviral agents include fusion inhibitors/chemokine receptor antagonists. Fusion inhibitors/chemokine receptor antagonists include CXCR4 antagonists such as AMD 3100 (a bicyclam), SDF-1 and its analogs, and ALX40-4C (a cationic peptide), T22 (an 18 amino acid peptide; Trimeris) and the T22 analogs T134 and T140; CCR5 antagonists such as RANTES (9-68), AOP-RANTES, NNY-RANTES, and TAK-779; and CCR5/CXCR4 antagonists such as NSC 651016 (a distamycin analog). Also included are CCR2B, CCR3, and CCR6 antagonists. Chemokine recpetor agonists such as RANTES, SDF-1, MIP-1α, MIP-1β, etc., may also inhibit fusion.

[0473] Additional antiretroviral agents include integrase inhibitors. Integrase inhibitors include dicaffeoylquinic (DFQA) acids; L-chloric acid (a dicaffeoyltartaric (DCTA) acid); quinalizarin (QLC) and related anthraquinones; ZINTEVIR™ (AR 177, an oligonucleotide that probably acts at cell surface rather than being a true integrase inhibitor; Arondex); and naphthols such as those disclosed in WO 98/50347.

[0474] Additional antiretroviral agents include hydroxyurea-like compunds such as BCX-34 (a purine nucleoside phosphorylase inhibitor; Biocryst); ribonucleotide reductase inhibitors such as DIDOX™ (Molecules for Health); inosine monophosphate dehydrogenase (IMPDH) inhibitors sucha as VX-497 (Vertex); and mycopholic acids such as CellCept (mycophenolate mofetil; Roche).

[0475] Additional antiretroviral agents include inhibitors of viral integrase, inhibitors of viral genome nuclear translocation such as arylene bis(methylketone) compounds; inhibitors of HIV entry such as AOP-RANTES, NNY-RANTES, RANTES-IgG fusion protein, soluble complexes of RANTES and glycosaminoglycans (GAG), and AMD-3100; nucleocapsid zinc finger inhibitors such as dithiane compounds; targets of HIV Tat and Rev; and pharmacoenhancers such as ABT-378.

[0476] Other antiretroviral therapies and adjunct therapies include cytokines and lymphokines such as MIP-1α, MIP-1β, SDF-1, IL-2, PROLEUKIN™ (aldesleukin/L2-7001; Chiron), IL-4, IL-10, IL-12, and IL-13; interferons such as IFN-α2a; antagonists of TNFs, NFκB, GM-CSF, M-CSF, and IL-10; agents that modulate immune activation such as cyclosporin and prednisone; vaccines such as Remune™ (HIV Immunogen), APL 400-003 (Apollon), recombinant gp120 and fragments, bivalent (B/E) recombinant envelope glycoprotein, rgp120CM235, MN rgp120, SF-2 rgp120, gp120/soluble CD4 complex, Delta JR-FL protein, branched synthetic peptide derived from discontinuous gp120 C3/C4 domain, fusion-competent immunogens, and Gag, Pol, Nef, and Tat vaccines; gene-based therapies such as genetic suppressor elements (GSEs; WO 98/54366), and intrakines (genetically modified CC chemokines targetted to the ER to block surface expression of newly synthesized CCR5 (Yang et al., PNAS 94:11567-72 (1997); Chen et al., Nat. Med. 3:1110-16 (1997)); antibodies such as the anti-CXCR4 antibody 12G5, the anti-CCR5 antibodies 2D7, 5C7, PA8, PA9, PA10, PA11, PA12, and PA14, the anti-CD4 antibodies Q4120 and RPA-T4, the anti-CCR3 antibody 7B11, the anti-gp120 antibodies 17b, 48d, 447-52D, 257-D, 268-D and 50.1, anti-Tat antibodies, anti-TNF-α antibodies, and monoclonal antibody 33A; aryl hydrocarbon (AH) receptor agonists and antagonists such as TCDD, 3,3′,4,4′,5-pentachlorobiphenyl, 3,3′,4,4′-tetrachlorobiphenyl, and α-naphthoflavone (WO 98/30213); and antioxidants such as γ-L-glutamyl-L-cysteine ethyl ester (γ-GCE; WO 99/56764).

[0477] In a further embodiment, the albumin fusion proteins and/or polynucleotides of the invention are administered in combination with an antiviral agent. Antiviral agents that may be administered with the albumin fusion proteins and/or polynucleotides of the invention include, but are not limited to, acyclovir, ribavirin, amantadine, and remantidine.

[0478] In other embodiments, albumin fusion proteins and/or polynucleotides of the invention may be administered in combination wi anti-opportunistic infection agents. Anti-opportunistic agents that may be administered in combination with the albumin fusion proteins and/or polynucleotides of the invention, include, but are not limited to, TRIMETHOPRIM-SULFAMETHOXAZOLE™, DAPSONE™, PENTAMIDINE™, ATOVAQUONE™, ISONIAZD™, RIFAMPIN™, PYRAZINAMIDE™, ETHAMBUTOL™, RIFABUTIN™, CLARITHROMYCIN™, AZITHROMYCIN™, GANCICLOVIR™, FOSCARNE™, CIDOFOVIR™, FLUCONAZOLE™, ITRACONAZOLE™, KETOCONAZOLE™, ACYCLOVIR™, FAMCICOLVIR™, PYRIMETHAMINE™, LEUCOVORIN™, NEUPOGEN™ (filgrastim/G-CSF), and LEUKINE™ (sargramostim/GM-CSF). In a specific embodiment, albumin fusion proteins and/or polynucleotides of the invention are used in any combination with TRIMETHOPRIM-SULFAMETHOXAZOLE™, DAPSONE™, PENTAMIDINE™, and/or ATOVAQUONE™ to prophylactically treat or prevent an opportunistic Pneumocystis carinii pneumonia infection. In another specific embodiment, albumin fusion proteins and/or polynucleotides of the invention are used in any combination with ISONIAZID™, RIFAMPIN™, PYRAZINAMIDE™, and/or ETHAMBUTOL™ to prophylactically treat or prevent an opportunistic Mycobacterium avium complex infection. In another specific embodiment, albumin fusion proteins and/or polynucleotides of the invention are used in any combination with RIFABUTIN™, CLARITHROMYCIN™, and/or AZITHROMYCIN™ to prophylactically treat or prevent an opportunistic Mycobacterium tuberculosis infection. In another specific embodiment, albumin fusion proteins and/or polynucleotides of the invention are used in any combination with GANCICLOVIR™, FOSCARNE™, and/or CIDOFOVIR™ to prophylactically treat or prevent an opportunistic cytomegalovirus infection. In another specific embodiment, albumin fusion proteins and/or polynucleotides of the invention are used in any combination with FLUCONAZOLE™, ITRACONAZOLE™, and/or KETOCONAZOLE™ to prophylactically treat or prevent an opportunistic fungal infection. In another specific embodiment, albumin fusion proteins and/or polynucleotides of the invention are used in any combination with ACYCLOVIR™ and/or FAMCICOLVIR™ to prophylactically treat or prevent an opportunistic herpes simplex virus type I and/or type II infection. In another specific embodiment, albumin fusion proteins and/or polynucleotides of the invention are used in any combination with PYRIMETHAMINE™ and/or LEUCOVORIN™ to prophylactically treat or prevent an opportunistic Toxoplasma gondii infection. In another specific embodiment, albumin fusion proteins and/or polynucleotides of the invention are used in any combination with LEUCOVORIN™ and/or NEUPOGEN™ to prophylactically treat or prevent an opportunistic bacterial infection.

[0479] In a further embodiment, the albumin fusion proteins and/or polynucleotides of the invention are administered in combination with an antibiotic agent. Antibiotic agents that may be administered with the albumin fusion proteins and/or polynucleotides of the invention. include, but are not limited to, amoxicirin, beta-lactamases, aminoglycosides, beta-lactam (glycopeptide), beta-lactamases, Clindamycin, chloramphenicol, cephalosporins, ciprofloxacin, erythromycin, fluoroquinolones, macrolides, metronidazole, penicillins, quinolones, rapamycin, rifampin, streptomycin, sulfonamide, tetracyclines, trimethoprim, trimethoprim-sulfamethoxazole, and vancomycin.

[0480] In other embodiments, the albumin fusion proteins and/or polynucleotides of the invention are administered in combination with immunestimulants. Immunostimulants that may be administered in combination with the albumin fusion proteins and/or polynucleotides of the invention include, but are not limited to, levamisole (e.g., ERGAMISOL™), isoprinosine (e.g. INOSIPLEX™), interferons (e.g. interferon alpha), and interleukins (e.g., IL-2).

[0481] In other embodiments, albumin fusion proteins and/or polynucleotides of the invention are administered in combination with immunosuppressive agents. Immunosuppressive agents that may be administered in combination with the albumin fusion proteins and/or polynucleotides of the invention include, but are not limited to, steroids, cyclosporine, cyclosporine analogs, cyclophosphamide methylprednisone, prednisone, azathioprine, FK-506, 15-deoxyspergualin, and other immunosuppressive agents that act by suppressing the function of responding T cells. Other immunosuppressive agents that may be administered in combination with the albumin fusion proteins and/or polynucleotides of the invention include, but are not limited to, prednisolone, methotrexate, thalidomide, methoxsalen, rapamycin, leflunomide, mizoribine (BREDININ™), brequinar, deoxyspergualin, and azaspirane (SKF 105685), ORTHOCLONE OKT® 3 (muromonab-CD3), SANDIMMUNE™, NEORAL™, SANGDYA™ (cyclosporine), PROGRAF® (FK506, tacrolimus), CELLCEPT® (mycophenolate motefil, of which the active metabolite is mycophenolic acid), IMURANTM (azathioprine), glucocorticosteroids, adrenocortical steroids such as DELTASONE™ (prednisone) and HYDELTRASOL™ (prednisolone), FOLEX™ and MEXATE™ (methotrxate), OXSORALFN-ULTRA™ (methoxsalen) and RAPAMUNE™ (sirolimus). In a specific embodiment, immunosuppressants may be used to prevent rejection of organ or bone marrow transplantation.

[0482] In an additional embodiment, albumin fusion proteins and/or polynucleotides of the invention are administered alone or in combination with one or more intravenous immune globulin preparations. Intravenous immune globulin preparations that may be administered with the albumin fusion proteins and/or polynucleotides of the invention include, but not limited to, GAMMAR™, IVEEGAM™, SANDOGLOBULIN™, GAMMAGARD S/D™, ATGAM™ (antithymocyte glubulin), and GAMIMUNE™. In a specific embodiment, albumin fusion proteins and/or polynucleotides of the invention are administered in combination with intravenous immune globulin preparations in transplantation therapy (e.g., bone marrow transplant).

[0483] In certain embodiments, the albumin fusion proteins and/or polynucleotides of the invention are administered alone or in combination with an anti-inflammatory agent. Anti-inflammatory agents that may be administered with the albumin fusion proteins and/or polynucleotides of the invention include, but are not limited to, corticosteroids (e.g. betamethasone, budesonide, cortisone, dexamethasone, hydrocortisone, methylprednisolone, prednisolone, prednisone, and triamcinolone), nonsteroidal anti-inflammatory drugs (e.g., diclofenac, diflunisal, etodolac, fenoprofen, floctafenine, flurbiprofen, ibuprofen, indomethacin, ketoprofen, meclofenamate, mefenamic acid, meloxicam, nabumetone, naproxen, oxaprozin, phenylbutazone, piroxicam, sulindac, tenoxicam, tiaprofenic acid, and tolmetin.), as well as antihistamines, aminoarylcarboxylic acid derivatives, arylacetic acid derivatives, arylbutyric acid derivatives, arylcarboxylic acids, arylpropionic acid derivatives, pyrazoles, pyrazolones, salicylic acid derivatives, thiazinecarboxamides, e-acetamidocaproic acid, S-adenosylmethionine, 3-amino-4-hydroxybutyric acid, amixetrine, bendazac, benzydamine, bucolome, difenpiramide, ditazol, emorfazone, guaiazulene, nabumetone, nimesulide, orgotein, oxaceprol, paranyline, perisoxal, pifoxime, proquazone, proxazole, and tenidap.

[0484] In an additional embodiment, the compositions of the invention are administered alone or in combination with an anti-angiogenic agent. Anti-angiogenic agents that may be administered with the compositions of the invention include, but are not limited to, Angiostatin (Entremed, Rockville, Md.), Troponin-1 (Boston Life Sciences, Boston, Mass.), anti-Invasive Factor, retinoic acid and derivatives thereof, paclitaxel (Taxol), Suramin, Tissue Inhibitor of Metalloproteinase-1, Tissue Inhibitor of Metalloproteinase-2, VEGI, Plasminogen Activator Inhibitor-1, Plasminogen Activator Inhibitor-2, and various forms of the lighter “d group” transition metals.

[0485] Lighter “d group” transition metals include, for example, vanadium, molybdenum, tungsten, titanium, niobium, and tantalum species. Such transition metal species may form transition metal complexes. Suitable complexes of the above-mentioned transition metal species include oxo transition metal complexes.

[0486] Representative examples of vanadium complexes include oxo vanadium complexes such as vanadate and vanadyl complexes. Suitable vanadate complexes include metavanadate and orthovanadate complexes such as, for example, ammonium metavanadate, sodium metavanadate, and sodium orthovanadate. Suitable vanadyl complexes include, for example, vanadyl acetylacetonate and vanadyl sulfate including vanadyl sulfate hydrates such as vanadyl sulfate mono- and trihydrates.

[0487] Representative examples of tungsten and molybdenum complexes also include oxo complexes. Suitable oxo tungsten complexes include tungstate and tungsten oxide complexes. Suitable tungstate complexes include ammonium tungstate, calcium tungstate, sodium tungstate dihydrate, and tungstic acid. Suitable tungsten oxides include tungsten (IV) oxide and tungsten (VI) oxide. Suitable oxo molybdenum complexes include molybdate, molybdenum oxide, and molybdenyl complexes. Suitable molybdate complexes include ammonium molybdate and its hydrates, sodium molybdate and its hydrates, and potassium molybdate and its hydrates. Suitable molybdenum oxides include molybdenum (VI) oxide, molybdenum (VI) oxide, and molybdic acid. Suitable molybdenyl complexes include, for example, molybdenyl acetylacetonate. Other suitable tungsten and molybdenum complexes include hydroxo derivatives derived from, for example, glycerol, tartaric acid, and sugars.

[0488] A wide variety of other anti-angiogenic factors may also be utilized within the context of the present invention. Representative examples include, but are not limited to, platelet factor 4; protamine sulphate; sulphated chitin derivatives (prepared from queen crab shells), (Murata et al., Cancer Res. 51:22-26, (1991)); Sulphated Polysaccharide Peptidoglycan Complex (SP-PG) (the function of this compound may be enhanced by the presence of steroids such as estrogen, and tamoxifen citrate); Staurosporine; modulators of matrix metabolism, including for example, proline analogs, cishydroxyproline, d,L-3,4-dehydroproline, Thiaproline, alpha,alpha-dipyridyl, aminopropionitrile fumarate; 4-propyl-5-(4-pyridinyl)-2(3H)-oxazolone; Methotrexate; Mitoxantrone; Heparin; Interferons; 2 Macroglobulin-serum; ChIMP-3 (Pavloff et al., J. Bio. Chem. 267:17321-17326, (1992)); Chymostatin (Tomlkinson et al., Biochem J. 286:475480, (1992)); Cyclodextrin Tetradecasulfate; Eponemycin; Camptothecin; Fumagillin (Ingber et al., Nature 348:555-557, (1990)); Gold Sodium Thiomalate (“GST”; Matsubara and Ziff, J. Clin. Invest. 79:1440-1446, (1987)); anticollagenase-serum; alpha2-antiplasmin (Holmes et al., J. Biol. Chem. 262(4):1659-1664, (1987)); Bisantrene (National Cancer Institute); Lobenzarit disodium (N-(2)-carboxyphenyl-4-chlorothronilic acid disodium or “CCA”; (Takeuchi et al., Agents Actions 36:312-316, (1992)); and metalloproteinase inhibitors such as BB94.

[0489] Additional anti-angiogenic factors that may also be utilized within the context of the present invention include Thalidomide, (Celgene, Warren, N.J.); Angiostatic steroid; AGM-1470 (H. Brem and J. Folkman J Pediatr. Surg. 28:445-51 (1993)); an integrin alpha v beta 3 antagonist (C. Storgard et al., J Clin. Invest 103:47-54 (1999)); carboxynaminolmidazole; Carboxyamidotriazole (CAI) (National Cancer Institute, Bethesda, Md.); Conbretastatin A4 (CA4P) (OXiGENE, Boston, Mass.); Squalamine (Magainin Pharmaceuticals, Plymouth Meeting, Pa.); TNP470, (Tap Pharmaceuticals, Deerfield, Ill.); ZD-0101 AstraZeneca (London, UK); APRA (CT2584); Benefin, Byrostatin-1 (SC339555); CGP41251 (PKC 412); CM101; Dexrazoxane (ICRF187); DMXAA; Endostatin; Flavopridiol; Genestein; GTE; ImmTher; Iressa (ZD1839); Octreotide (Somatostatin); Panretin; Penacillamine; Photopoint; PI-88; Prinomastat (AG-3340) Purlytin; Suradista (FCE26644); Tamoxifen (Nolvadex); Tazarotene; Tetrathiomolybdate; Xeloda (Capecitabine); and 5-Fluorouracil.

[0490] Anti-angiogenic agents that may be administed in combination with the compounds of the invention may work through a variety of mechanisms including, but not limited to, inhibiting proteolysis of the extracellular matrix, blocking the function of endothelial cell-extracellular matrix adhesion molecules, by antagonizing the function of angiogenesis inducers such as growth factors, and inhibiting integrin receptors expressed on proliferating endothelial cells. Examples of anti-angiogenic inhibitors that interfere with extracellular matrix proteolysis and which may be administered in combination with the compositons of the invention include, but are not Imited to, AG-3340 (Agouron, La Jolla, Calif.), BAY-12-9566 (Bayer, West Haven, Conn.), BMS-275291 (Bristol Myers Squibb, Princeton, N.J.), CGS-27032A (Novartis, East Hanover, N.J.), Marimastat (British Biotech, Oxford, UK), and Metastat (Aetema, St-Foy, Quebec). Examples of anti-angiogenic inhibitors that act by blocking the function of endothelial cell-extracellular matrix adhesion molecules and which may be administered in combination with the compositons of the invention include, but are not Imited to, EMD-121974 (Merck KcgaA Darmstadt, Germany) and Vitaxin (Ixsys, La Jolla, Calif./Medimmune, Gaithersburg, Md.). Examples of anti-angiogenic agents that act by directly antagonizing or inhibiting angiogenesis inducers and which may be administered in combination with the compositons of the invention include, but are not Imited to, Angiozyme (Ribozyme, Boulder, Colo.), Anti-VEGF antibody (Genentech, S. San Francisco, Calif.), PTK-787/ZK-225846 (Novartis, Basel, Switzerland), SU-101 (Sugen, S. San Francisco, Calif.), SU-5416 (Sugen/Pharmacia Upjohn, Bridgewater, N.J.), and SU-6668 (Sugen). Other anti-angiogenic agents act to indirectly inhibit angiogenesis. Examples of indirect inhibitors of angiogenesis which may be administered in combination with the compositons of the invention include, but are not limited to, IM-862 (Cytran, Kirkland, Wash.), Interferon-alpha, IL-12 (Roche, Nutley, N.J.), and Pentosan polysulfate (Georgetown University, Washington, D.C.).

[0491] In particular embodiments, the use of compositions of the invention in combination with anti-angiogenic agents is contemplated for the treatment, prevention, and/or amelioration of an autoimmune disease, such as for example, an autoimmune disease described herein.

[0492] In a particular embodiment, the use of compositions of the invention in combination with anti-angiogenic agents is contemplated for the treatment, prevention, and/or amelioration of arthritis. In a more particular embodiment, the use of compositions of the invention in combination with anti-angiogenic agents is contemplated for the treatment, prevention, and/or amelioration of rheumatoid arthritis.

[0493] In another embodiment, the polynucleotides encoding a polypeptide of the present invention are administered in combination with an angiogenic protein, or polynucleotides encoding an angiogenic protein. Examples of angiogenic proteins that may be administered with the compositions of the invention include, but are not limited to, acidic and basic fibroblast growth factors, VEGF-1, VEGF-2, VEGF-3, epidermal growth factor alpha and beta, platelet-derived endothelial cell growth factor, platelet-derived growth factor, tumor necrosis factor alpha, hepatocyte growth factor, insulin-like growth factor, colony stimulating factor, macrophage colony stimulating factor, granulocyte/macrophage colony stimulating factor, and nitric oxide synthase.

[0494] In additional embodiments, compositions of the invention are administered in combination with a chemotherapeutic agent. Chemotherapeutic agents that may be administered with the albumin fusion proteins and/or polynucleotides of the invention include, but are not limited to alkylating agents such as nitrogen mustards (for example, Mechlorethamine, cyclophosphamide, Cyclophosphamide Ifosfamide, Melphalan (L-sarcolysin), and Chlorambucil), ethylenimines and methylmelamines (for example, Hexamethylmelamine and Thiotepa), alkyl sulfonates (for example, Busulfan), nitrosoureas (for example, Carmustine (BCNU), Lomustine (CCNU), Semustine (methyl-CCNU), and Streptozocin (streptozotocin)), triazenes (for example, Dacarbazine (DTIC; dimethyltriazenoimidazolecarboxamide)), folic acid analogs (for example, Methotrexate (amethopterin)), pyrimidine analogs (for example, Fluorouacil (5-fluorouracil; 5-FU), Floxuridine (fluorodeoxyuridine; FudR), and Cytarabine (cytosine arabinoside)), purine analogs and related inhibitors (for example, Mercaptopurine (6-mercaptopurine; 6-MP), Thioguanine (6-thioguanine; TG), and Pentostatin (2′-deoxycoformycin)), vinca alkaloids (for example, Vinblastine (VLB, vinblastine sulfate)) and Vincristine (vincristine sulfate)), epipodophyllotoxins (for example, Etoposide and Teniposide), antibiotics (for example, Dactinomycin (actinomycin D), Daunorubicin (daunomycin; rubidomycin), Doxorubicin, Bleomycin, Plicamycin (mithramycin), and Mitormycin (mitomycin C), enzymes (for example, L-Asparaginase), biological response modifiers (for example, Interferon-alpha and interferon-alpha-2b), platinum coordination compounds (for example, Cisplatin (cis-DDP) and Carboplatin), antbracenedione (Mitoxantrone), substituted ureas (for example, Hydroxyurea), methylhydrazine derivatives (for example, Procarbazine (N-methylhydrazine; MIH), adrenocorticosteroids (for example, Prednisone), progestins (for example, Hydroxyprogesterone caproate, Medroxyprogesterone, Medroxyprogesterone acetate, and Megestrol acetate), estrogens (for example, Diethylstilbestrol (DES), Diethylstilbestrol diphosphate, Estradiol, and Ethinyl estradiol), antiestrogens (for example, Tamoxifen), androgens (Testosterone proprionate, and Fluoxymesterone), antiandrogens (for example, Flutamide), gonadotropin-releasing horomone analogs (for example, Leuprolide), other hormones and hormone analogs (for example, methyltestosterone, estramustine, estramustine phosphate sodium, chlorotrianisene, and testolactone), and others (for example, dicarbazine, glutamic acid, and mitotane).

[0495] In one embodiment, the compositions of the invention are administered in combination with one or more of the following drug infliximab (also known as Remicade™ Centocor, Inc.), Trocade (Roche, RO-32-3555), Leflunomide (also known as Arava™ from Hoechst Marion Roussel), Kineret™ (an IL-1 Receptor antagonist also known as Anakinra from Amgen, Inc.)

[0496] In a specific embodiment, compositions of the invention are administered in combination with CHOP (cyclophosphamide, doxorubicin, vincristine, and prednisone) or combination of one or more of the components of CHOP. In one embodiment, the compositions of the invention are administered in combination with anti-CD20 antibodies, human monoclonal anti-CD20 antibodies. In another embodiment, the compositions of the invention are administered in combination with anti-CD20 antibodies and CHOP, or anti-CD20 antibodies and any combination of one or more of the components of CHOP, particularly cyclophosphamide and/or prednisone. In a specific embodiment, compositions of the invention are administered in combination with Rituximab. In a further embodiment, compositions of the invention are administered with Rituximab and CHOP, or Rituximab and any combination of one or more of the components of CHOP, particularly cyclophosphamide and/or prednisone. In a specific embodiment, compositions of the invention are administered in combination with tositumomab. In a further embodiment, compositions of the invention are administered with tositumomab and CHOP, or tositumomab and any combination of one or more of the components of CHOP, particularly cyclophosphamide and/or prednisone. The anti-CD20 antibodies may optionally be associated with radioisotopes, toxins or cytotoxic prodrugs.

[0497] In another specific embodiment, the compositions of the invention are administered in combination Zevaiin™. In a further embodiment, compositions of the invention are administered with Zevalin™ and CHOP, or Zevalin™ and any combination of one or more of the components of CHOP, particularly cyclophosphamide and/or prednisone. Zevalin™ may be associated with one or more radisotopes. Particularly preferred isotopes are ⁹⁰Y and ¹¹¹In.

[0498] In an additional embodiment, the albumin fusion proteins and/or polynucleotides of the invention are administered in combination with cytokines. Cytokines that may be administered with the albumin fusion proteins and/or polynucleotides of the invention include, but are not limited to, IL2, IL3, IL4, IL5, IL6, IL7, IL10, IL12, IL13, IL15, anti-CD40, CD40L, IFN-gamma and TNF-alpha. In another embodiment, albumin fusion proteins and/or polynucleotides of the invention may be administered with any interleukin, including, but not limited to, IL-1alpha, IL-1beta, IL-2, IL-3, IL-4, IL-5, IL-6, IL-7, IL-8, IL-9, IL-10, IL-11, IL-12, IL-13, IL-14, IL-15, IL-16, IL-17, IL-18, IL-19, IL-20, and IL21.

[0499] In one embodiment, the albumin fusion proteins and/or polynucleotides of the invention are administered in combination with members of the TNF family. TNF, TNF-related or TNF-like molecules that may be administered with the albumin fusion proteins and/or polynucleotides of the invention include, but are not limited to, soluble forms of TNF-alpha, lymphotoxin-alpha (LT-alpha, also known as TNF-beta), LT-beta (found in complex heterotrimer LT-alpha2-beta), OPGL, FasL, CD27L, CD30L, CD40L, 4-1BBL, DcR3, OX40L, TNF-gamma (International Publication No. WO 96/14328), AIM-1 (international Publication No. WO 97/33899), endokine-alpha (International Publication No. WO 98/07880), OPG, and neutrokine-alpha (International Publication No. WO 98/18921, OX40, and nerve growth factor (NGF), and soluble forms of Fas, CD30, CD27, CD40 and 4-IBB, TR2 (International Publication No. WO 96/34095), DR3 (International Publication No. WO 97/33904), DR4 (International Publication No. WO 98/32856), TR5 (International Publication No. WO 98/30693), TRANK, TR9 (International Publication No. WO 98/56892),TR10 (International Publication No. WO 98/54202), 312C2 (International Publication No. WO 98/06842), and TR12, and soluble forms CD154, CD70, and CD153.

[0500] In an additional embodiment, the albumin fusion proteins and/or polynucleotides of the invention are administered in combination with angiogenic proteins. Angiogenic proteins that may be administered with the albumin fusion proteins and/or polynucleotides of the invention include, but are not limited to, Glioma Derived Growth Factor (GDGF), as disclosed in European Patent Number EP-399816; Platelet Derived Growth Factor-A (PDGF-A), as disclosed in European Patent Number EP-682 110; Platelet Derived Growth Factor-B (PDGF-B), as disclosed in European Patent Number EP-282317; Placental Growth Factor (PIGF), as disclosed in International Publication Number WO 92/06194; Placental Growth Factor-2 (PIGF-2), as disclosed in Hauser et al., Growth Factors, 4:259-268 (1993); Vascular Endothelial Growth Factor (VEGF), as disclosed in International Publication Number WO 90/13649; Vascular Endothelial Growth Factor-A (VEGF-A), as disclosed in European Patent Number EP-506477; Vascular Endothelial Growth Factor-2 (VEGF-2), as disclosed in International Publication Number WO 96/39515; Vascular Endothelial Growth Factor B (VEGF-3); Vascular Endothelial Growth Factor B-186 (VEGF-B186), as disclosed in International Publication Number WO 96/26736; Vascular Endothelial Growth Factor-D (VEGF-D), as disclosed in International Publication Number WO 98/02543; Vascular Endothelial Growth Factor-D (VEGF-D), as disclosed in International Publication Number WO 98/07832; and Vascular Endothelial Growth Factor-E (VEGF-E), as disclosed in German Patent Number DE19639601. The above mentioned references are herein incorporated by reference in their entireties.

[0501] In an additional embodiment, the albumin fusion proteins and/or polynucleotides of the invention are administered in combination with Fibroblast Growth Factors. Fibroblast Growth Factors that may be administered with the albumin fusion proteins and/or polynucleotides of the invention include, but are not limited to, FGF-1, FGF-2, FGF-3, FGF-4, FGF-5, FGF-6, FGF-7, FGF-8, FGF-9, FGF-10, FGF-11, FGF-12, FGF-13, FGF-14, and FGF-15.

[0502] In an additional embodiment, the albumin fusion proteins and/or polynucleotides of the invention are administered in combination with hematopoietic growth factors. Hematopoietic growth factors that may be administered with the albumin fusion proteins and/or polynucleotides of the invention include, but are not limited to, granulocyte macrophage colony stimulating factor (GM-CSF) (sargramostim, LEUKINE™, PROKINE™), granulocyte colony stimulating factor (G-CSF) (filgrastim, NEUPOGEN™), macrophage colony stimulating factor (M-CSF, CSF-1) erythropoietin (epoetin alfa, EPOGEN™, PROCRIT™), stem cell factor (SCF, c-kit ligand, steel factor), megakaryocyte colony stimulating factor, PIXY321 (a GMCSF/IL-3 fusion protein), interleukins, especially any one or more of IL-1 through IL-12, interferon-gamma, or thrombopoietin.

[0503] In certain embodiments, albumin fusion proteins and/or polynucleotides of the present invention are administered in combination with adrenergic blockers, such as, for example, acebutolol, atenolol, betaxolol, bisoprolol, carteolol, labetalol, metoprolol, nadolol, oxprenolol, penbutolol, pindolol, propranolol, sotalol, and timolol.

[0504] In another embodiment, the albumin fusion proteins and/or polynucleotides of the invention are administered in combination with an antiarrhythmic drug (e.g., adenosine, amidoarone, bretylium, digitalis, digoxin, digitoxin, diliazem, disopyramide, esmolol, flecainide, lidocaine, mexiletine, moricizine, phenytoin, procainamide, N-acetyl procainamide, propafenone, propranolol, quinidine, sotalol, tocainide, and verapamil).

[0505] In another embodiment, the albumin fusion proteins and/or polynucleotides of the invention are administered in combination with diuretic agents, such as carbonic anhydrase-inhibiting agents (e.g., acetazolamide, dichlorphenamide, and methazolamide), osmotic diuretics (e.g., glycerin, isosorbide, mannitol, and urea), diuretics that inhibit Na⁺—K⁺-2Cl⁻ symport (e.g., furosemide, bumetanide, azosemide, piretanide, tripamide, ethacrynic acid, muzolimine, and torsemide), thiazide and thiazide-like diuretics (e.g., bendroflumethiazide, benzthiazide, chlorothiazide, hydrochlorothiazide, hydroflumethiazide, methyclothiazide, polythiazide, trichormethiazide, chlorthalidone, indapamide, metolazone, and quinethazone), potassium sparing diuretics (e.g., amiloride and triamterene), and mineralcorticoid receptor antagonists (e.g., spironolactone, canrenone, and potassium canrenoate).

[0506] In one embodiment, the albumin fusion proteins and/or polynucleotides of the invention are administered in combination with treatments for endocrine and/or hormone imbalance disorders. Treatments for endocrine and/or hormone imbalance disorders include, but are not limited to, ¹²⁷I, radioactive isotopes of iodine such as ¹³¹I and ¹²³I; recombinant growth hormone, such as HUMATROPE™ (recombinant somatropin); growth hormone analogs such as PROTROPIN™ (somatrem); dopamine agonists such as PARLODEL™ (bromocriptine); somatostatin analogs such as SANDOSTATIN™ (octreotide); gonadotropin preparations such as PREGNYL™, A.P.L.™ and PROFASI™ (chorionic gonadotropin (CG)), PERGONAL™ (menotropins), and METRODIN™ (urofollitropin (uFSH)); synthetic human gonadotropin releasing hormone preparations such as FACTREL™ and LUTREPULSE™ (gonadorelin hydrochloride); synthetic gonadotropin agonists such as LUPRON™ (leuprolide acetate), SUPPRELIN™ (histrelin acetate), SYNAREL™ (nafarelin acetate), and ZOLADEX™ (goserelin acetate); synthetic preparations of thyrotropin-releasing hormone such as RELEFACT TRH™ and THYPINONE™ (protirelin); recombinant human TSH such as THYROGEN™; synthetic preparations of the sodium salts of the natural isomers of thyroid hormones such as L-T₄™ , SYNTHROID™ and LEVOTHROID™ (levothyroxine sodium), L-T₃™, CYTOMEL™ and TRIOSTAT™ (liothyroine sodium), and THYROLAR™ (liotrix); antithyroid compounds such as 6-n-propylthiouracil (propylthiouracil), 1-methyl-2-mercaptoimidazole and TAPAZOLE™ (methimazole), NEO-MERCAZOLE™ (carbimazole); beta-adrenergic receptor antagonists such as propranolol and esmolol; Ca²⁺ channel blockers; dexamethasone and iodinated radiological contrast agents such as TELEPAQUE™ (iopanoic acid) and ORAGRAFIN™ (sodium ipodate).

[0507] Additional treatments for endocrine and/or hormone imbalance disorders include, but are not limited to, estrogens or congugated estrogens such as ESTRACE™ (estradiol), ESTINYL™ (ethinyl estradiol), PREMARIN™, ESTRATAB™, ORTHO-ES™, OGEN™ and estropipate (estrone), ESTROVIS™ (quinestrol), ESTRADERM™ (estradiol), DELESTROGEN™ and VALERGEN™ (estradiol valerate), DEPO-ESTRADIOL CYPIONATE™ and ESTROJECT LA™ (estradiol cypionate); antiestrogens such as NOLVADEX™ (tamoxifen), SEROPHENE™ and CLOMID™ (clomiphene); progestins such as DURALUTIN™ (hydroxyprogesterone caproate), MPA™ and DEPO-PROVERA™ (medroxyprogesterone acetate), PROVERA™ and CYCRIN™ (MPA), MEGACE™ (megestrol acetate), NORLUTIN™ (norethindrone), and NORLUTATE™ and AYGESTIN™ (norethindrone acetate); progesterone implants such as NORPLANT SYSTEM™ (subdermal implants of norgestrel); antiprogestins such as RU 486™ (mifepristone); hormonal contraceptives such as ENOVID™ (norethynodrel plus mestranol), PROGESTASERT™ (intrauterine device that releases progesterone), LOESTRIN™, BREVICON™, MODICON™, GENORA™, NELONA™, NORINYL™, OVACON-35™ and OVACON-50™ (ethinyl estradiol/norethindrone), LEVLEN™, NORDETTE™, TRI-LEVLEN™ and TRIPHASIL-21™ (ethinyl estradiol/levonorgestrel) LO/OVRAL™ and OVRAL™ (ethinyl estradiol/norgestrel), DEMULEN™ (ethinyl estradiovethynodiol diacetate), NORINYL™, ORTHO-NOVUM™, NORETHIN™, GENORA™, and NELOVA™ (norethindrone/mestranol), DESOGEN™ and ORTHO-CEP™ (ethinyl estradioldesogestrel), ORTHO-CYCLEN™ and ORTHO-TRICYCLEN™ (ethinyl estradiovnorgestimate), MICRONOR™ and NOR-QD™ (norethindrone), and OVRETFE™ (norgestrel).

[0508] Additional treatments for endocrine and/or hormone imbalance disorders include, but are not limited to, testosterone esters such as methenolone acetate and testosterone undecanoate; parenteral and oral androgens such as TESTOJECT-50™ (testosterone), TESTEX™ (testosterone propionate), DELATESTRYL™ (testosterone enanthate), DEPO-TESTOSTERONE™ (testosterone cypionate), DANOCRINE™ (danazol), HALOTESTIN™ (fluoxymesterone), ORETON METHYL™, TESTRED™ and VIRILON™ (methyltestosterone), and OXANDRIN™ (oxandrolone); testosterone transdermal systems such as TESTODERM™; androgen receptor antagonist and 5-alpha-reductase inhibitors such as ANDROCUR™ (cyproterone acetate), EULEXIN™ (flutamide), and PROSCAR™ (finasteride); adrenocorticotropic hormone preparations such as CORTROSYN™ (cosyntropin); adrenocortical steroids and their synthetic analogs such as ACLOVATE™ (alclometasone dipropionate), CYCLOCORT™ (amcinonide), BECLOVENT™ and VANCERIL™ (beclomethasone dipropionate), CELESTONE™ (betamethasone), BENISONE™ and UTICOR™ (betamethasone benzoate), DIPROSONE™ (betamethasone dipropionate), CELESTONE PHOSPHATE™ (betamethasone sodium phosphate), CELESTONE SOLUSPAN™ (betamethasone sodium phosphate and acetate), BETA-VAL™ and VALISONE™ (betamethasone valerate), TEMOVATE™ (clobetasol propionate), CLODERM™ (clocortolone pivalate), CORTEF™ and HYDROCORTONE™ (cortisol (hydrocortisone)), HYDROCORTONE ACETATE™ (cortisol (hydrocortisone) acetate), LOCOID™ (cortisol (hydrocortisone) butyrate), HYDROCORTONE PHOSPHATE™ (cortisol (hydrocortisone) sodium phosphate), A-HYDROCORT™ and SOLU CORTEF™ (cortisol (hydrocortisone) sodium succinate), WESTCORT™ (cortisol (hydrocortisone) valerate), CORTISONE ACETATE™ (cortisone acetate), DESOWEN™ and TRIDESHLON™ (desonide), TOPICORT™ (desoximetasone), DECADRON™ (dexamethasone), DECADRON LA™ (dexamethasone acetate), DECADRON PHOSPHATE™ and HEXADROL PHOSPHATE™ (dexamethasone sodium phosphate), FLORONE™ and MAXFLOR™ (diflorasone diacetate), FLORINEF ACETATE™ (fludrocortisdne acetate), AEROBID™ and NASALIDE™ (flunisolide), FLUONIDTM and SYNALARTM (fluocinolone acetonide), LIDEX™ (fluocinonide), FLUOR-OP™ and FML™ (fluorometholone), CORDRAN™ (flurandrenolide), HALOG™ (halcinonide), HMS LIZUIFILM™ (medrysone), MEDROL™ (methylprednisolone), DEPO-MEDROL™ and MEDROL ACETATE™ (methylprednisone acetate), A-METHAPRED™ and SOLUMEDROL™ (methylprednisolone sodium succinate), ELOCON™ (mometasone furoate), HALDRONE™ (paramethasone acetate), DELTA-CORTEF™ (prednisolone), ECONOPRED™ (prednisolone acetate), HYDELTRASOL™ (prednisolone sodium phosphate), HYDELTRA-T.B.A™ (prednisolone tebutate), DELTASONE™ (prednisone), ARISTOCOR™ and KENACORT™ (triamcinolone), KENALOG™ (triamcinolone acetonide), ARISTOCOR™ and KENACORT DIACETATE™ (triamcinolone diacetate), and ARISTOSPAN™ (triamcinolone hexacetonide); inhibitors of biosynthesis and action of adrenocortical steroids such as CYTADREN™ (aminoglutethimide), NIZORAL™ (ketoconazole), MODRASTANE™ (trilostane), and METOPIRONETM (metyrapone); bovine, porcine or human insulin or mixtures thereof; insulin analogs; recombinant human insulin such as HUMULN™ and NOVOLIN™; oral hypoglycemic agents such as ORAMIDE™ and ORINASE™ (tolbutamide), DIABINESE™ (chlorpropamide), TOLAMIDE™ and TOLINASE™ (tolazamide), DYMELOR™ (acetohexamide), glibenclamide, MICRONASE™, DIBETA™ and GLYNASE™ (glyburide), GLUCOTROL™ (glipizide), and DIAMICRON™ (gliclazide), GLUCOPHAGE™ (metformin), ciglitazone, pioglitazone, and alpha-glucosidase inhibitors; bovine or porcine glucagon; somatostatins such as SANDOSTATIN™ (octreotide); and diazoxides such as PROGLYCEM™ (diazoxide).

[0509] In one embodiment, the albumin fusion proteins and/or polynucleotides of the invention are administered in combination with treatments for uterine motility disorders. Treatments for uterine motility disorders include, but are not limited to, estrogen drugs such as conjugated estrogens (e.g., PREMARIN® and ESTRATAB®), estradiols (e.g., CLIMARA® and ALORA®), estropipate, and chlorotrianisene; progestin drugs (e.g., AMEN® (medroxyprogesterone), MICRONOR® (norethidrone acetate), PROMETRIUTM® progesterone, and megestrol acetate); and estrogen/progesterone combination therapies such as, for example, conjugated estrogens/medroxyprogesterone (e.g., PREMPRO™ and PREMPHASE®) and norethindrone acetate/ethinyl estsradiol (e.g., FEMHRT™).

[0510] In an additional embodiment, the albumin fusion proteins and/or polynucleotides of the invention are administered in combination with drugs effective in treating iron deficiency and hypochromic anemias, including but not limited to, ferrous sulfate (iron sulfate, FEOSOL™), ferrous fumarate (e.g., FEOSTAT™), ferrous gluconate (e.g., FERGON™), polysaccharide-iron complex (e.g., NIFEREX™), iron dextran injection (e.g., INFED™), cupric sulfate, pyroxidine, riboflavin, Vitamin B₁₂, cyancobalamin injection (e.g., REDISOL™, RUBRAMIN PC™), hydroxocobalamin, folic acid (e.g., FOLVITE™), leucovorin (folinic acid, 5-CHOH4PteGlu, citrovorum factor) or WELLCOVORIN (Calcium salt of leucovorin), transferrin or ferritin.

[0511] In certain embodiments, the albumin fusion proteins and/or polynucleotides of the invention are administered in combination with agents used to treat psychiatric disorders. Psychiatric drugs that may be administered with the albumin fusion proteins and/or polynucleotides of the invention include, but are not limited to, antipsychotic agents (e.g., chlorpromazine, chlorprothixene, clozapine, fluphenazine, haloperidol, loxapine, mesoridazine, molindone, olanzapine, perphenazine, pimozide, quetiapine, risperidone, thioridazine, thiothixene, trifluoperazine, and triflupromazine), antimanic agents (e.g., carbamazepine, divalproex sodium, lithium carbonate, and lithium citrate), antidepressants (e.g., amitriptyline, amoxapine, bupropion, citalopram, clomipramine, desipramine, doxepin, fluvoxamine, fluoxetine, imipramine, isocarboxazid, maprotiline, mirtazapine, nefazodone, nortriptyline, paroxetine, phenelzine, protriptyline, sertraline, tranylcypromine, trazodone, trimipramine, and venlafaxine), antianxiety agents (e.g., alprazolam, buspirone, chlordiazepoxide, clorazepate, diazepam, halazepam, lorazepam, oxazepam, and prazepam), and stimulants (e.g., d-amphetamine, methylphenidate, and pemoline).

[0512] In other embodiments, the albumin fusion proteins and/or polynucleotides of the invention are administered in combination with agents used to treat neurological disorders. Neurological agents that may be administered with the albumin fusion proteins and/or polynucleotides of the invention include, but are not limited to, antiepileptic agents (e.g., carbamazepine, clonazepam, ethosuximide, phenobarbital, phenytoin, primidone, valproic acid, divalproex sodium, felbamate, gabapentin, lamotrigine, levetiracetam, oxcarbazepine, tiagabine, topiramate, zonisamide, diazepam, lorazepam, and clonazepam), antiparkinsonian agents (e.g., levodopa/carbidopa, selegiline, amantidine, bromocriptine, pergolide, ropinirole, pramipexole, benztropine; biperiden; ethopropazine; procyclidine; trihexyphenidyl, tolcapone), and ALS therapeutics (e.g. riluzole).

[0513] In another embodiment, albumin fusion proteins and/or polynucleotides of the invention are administered in combination with vasodilating agents and/or calcium channel blocking agents. Vasodilating agents that may be administered with the albumin fusion proteins and/or polynucleotides of the invention include, but are not limited to, Angiotensin Converting Enzyme (ACE) inhibitors (e.g., papaverine, isoxsuprine, benazepril, captopril, cilazapril, enalapril, enalaprilat, fosinopril, lisinopril, moexipril, perindopril, quinapril, ramipril, spirapril, trandolapril, and nylidrin), and nitrates (e.g., isosorbide dinitrate, isosorbide mononitrate, and nitroglycerin). Examples of calcium channel blocking agents that may be administered in combination with the albumin fusion proteins and/or polynucleotides of the invention include, but are not limited to amlodipine, bepridil, diltiazem, felodipine, flunarizine, isradipine, nicardipine, nifedipine, nimodipine, and verapamil.

[0514] In certain embodiments, the albumin fusion proteins and/or polynucleotides of the invention are administered in combination treatments for gastrointestinal disorders. Treatments for gastrointestinal disorders that may be administered with the albumin fusion protein and/or polynucleotide of the invention include, but are not limited to, H₂ histamine receptor antagonists (e.g., TAGAMET™ (cimetidine), ZANTAC™ (ranitidine), PEPCID™ (famotidine), and AXID™ (nizatidine)); inhibitors of H⁺, K⁺ ATPase (e.g., PREVACID™ (lansoprazole) and PRILOSEC™ (omeprazole)); Bismuth compounds (e.g., PEPTO-BISMOL™ (bismuth subsalicylate) and DE-NOL™ (bismuth subcitrate)); various antacids; sucralfate; prostaglandin analogs (e.g. CYTOTEC™ (misoprostol)); muscarinic cholinergic antagonists; laxatives (e.g., surfactant laxatives, stimulant laxatives, saline and osmotic laxatives); antidiarrheal agents (e.g., LOMOTIL™ (diphenoxylate) MOTOFEN™ (diphenoxin), and IMODIUM™ (loperamide hydrochloride)), synthetic analogs of somatostatin such as SANDOSTATIN™ (octreotide), antiemetic agents (e.g., ZOFRAN™ (ondansetron), KYTRIL™ (granisetron hydrochloride), tropisetron, dolasetron, metoclopramide, chlorpromazine, perphenazine, prochlorperazine, promethazine, thiethylperazine, triflupromazine, domperidone, haloperidol, droperidol, trimethobenzamide, dexamethasone, methylprednisolone, dronabinol, and nabilone); D2 antagonists (e.g., metoclopramide, trimethobenzamide and chlorpromazine); bile salts; chenodeoxycholic acid; ursodeoxycholic acid; and pancreatic enzyme preparations such as pancreatin and pancrelipase.

[0515] In additional embodiments, the albumin fusion proteins and/or polynucleotides of the invention are administered in combination with other therapeutic or prophylactic regimens, such as, for example, radiation therapy.

[0516] The invention also provides a pharmaceutical pack or kit comprising one or more containers filled with one or more of the ingredients of the pharmaceutical compositions comprising albumin fusion proteins of the invention. Optionally associated with such container(s) can be a notice in the form prescribed by a governmental agency regulating the manufacture, use or sale of pharmaceuticals or biological products, which notice reflects approval by the agency of manufacture, use or sale for human administration.

[0517] Gene Therapy

[0518] Constructs encoding albumin fusion proteins of the invention can be used as a part of a gene therapy protocol to deliver therapeutically effective doses of the albumin fusion protein. A preferred approach for in vivo introduction of nucleic acid into a cell is by use of a viral vector containing nucleic acid, encoding an albumin fusion protein of the invention. Infection of cells with a viral vector has the advantage that a large proportion of the targeted cells can receive the nucleic acid. Additionally, molecules encoded within the viral vector, e.g., by a cDNA contained in the viral vector, are expressed efficiently in cells which have taken up viral vector nucleic acid.

[0519] Retrovirus vectors and adeno-associated virus vectors can be used as a recombinant gene delivery system for the transfer of exogenous nucleic acid molecules encoding albumin fusion proteins in vivo. These vectors provide efficient delivery of nucleic acids into cells, and the transferred nucleic acids are stably integrated into the chromosomal DNA of the host. The development of specialized cell lines (termed “packaging cells”) which produce only replication-defective retroviruses has increased the utility of retroviruses for gene therapy, and defective retroviruses are characterized for use in gene transfer for gene therapy purposes (for a review see Miller, A. D. (1990) Blood 76:27 1). A replication defective retrovirus can be packaged into virions which can be used to infect a target cell through the use of a helper virus by standard techniques. Protocols for producing recombinant retroviruses and for infecting cells in vitro or in vivo with such viruses can be found in Current Protocols in Molecular Biology, Ausubel, F. M. et al., (eds.) Greene Publishing Associates, (1989), Sections 9.10-9.14 and other standard laboratory manuals.

[0520] Another viral gene delivery system useful in the present invention uses adenovirus-derived vectors. The genome of an adenovirus can be manipulated such that it encodes and expresses a gene product of interest but is inactivated in terms of its ability to replicate in a normal lytic viral life cycle. See, for example, Berkner et al., BioTechniques 6:616 (1988); Rosenfeld et al., Science 252:431-434 (1991); and Rosenfeld et al., Cell 68:143-155 (1992). Suitable adenoviral vectors derived from the adenovirus strain Ad type 5 d1324 or other strains of adenovirus (e.g., Ad2, Ad3, Ad7 etc.) are known to those skilled in the art. Recombinant adenoviruses can be advantageous in certain circumstances in that they are not capable of infecting nondividing cells and can be used to infect a wide variety of cell types, including epithelial cells (Rosenfeld et al., (1992) cited supra). Furthermore, the virus particle is relatively stable and amenable to purification and concentration, and as above, can be modified so as to affect the spectrum of infectivity. Additionally, introduced adenoviral DNA (and foreign DNA contained therein) is not integrated into the genome of a host cell but remains episomal, thereby avoiding potential problems that can occur as a result of insertional mutagenesis in situations where introduced DNA becomes integrated into the host genome (e.g., retroviral DNA). Moreover, the carrying capacity of the adenoviral genome for foreign DNA is large (up to 8 kilobases) relative to other gene delivery vectors (Berkner et al., cited supra; Haj-Ahmand et al., J. Virol. 57:267 (1986)).

[0521] In another embodiment, non-viral gene delivery systems of the present invention rely on endocytic pathways for the uptake of the subject nucleotide molecule by the targeted cell. Exemplary gene delivery systems of this type include liposomal derived systems, poly-lysine conjugates, and artificial viral envelopes. In a representative embodiment, a nucleic acid molecule encoding an albumin fusion protein of the invention can be entrapped in liposomes bearing positive charges on their surface (e.g., lipofectins) and (optionally) which are tagged with antibodies against cell surface antigens of the target tissue (Mizuno et al. (1992) No Shinkei Geka 20:547-551; PCT publication WO91/06309; Japanese patent application 1047381; and European patent publication EP-A-43075).

[0522] Gene delivery systems for a gene encoding an albumin fusion protein of the invention can be introduced into a patient by any of a number of methods. For instance, a pharmaceutical preparation of the gene delivery system can be introduced systemically, e.g. by intravenous injection, and specific transduction of the protein in the target cells occurs predominantly from specificity of transfection provided by the gene delivery vehicle, cell-type or tissue-type expression due to the transcriptional regulatory sequences controlling expression of the receptor gene, or a combination thereof. In other embodiments, initial delivery of the recombinant gene is more limited with introduction into the animal being quite localized. For example, the gene delivery vehicle can be introduced by catheter (see U.S. Pat. No. 5,328,470) or by Stereotactic injection (e.g. Chen et al. (1994) PNAS 91: 3054-3057). The pharmaceutical preparation of the gene therapy construct can consist essentially of the gene delivery system in an acceptable diluent, or can comprise a slow release matrix in which the gene delivery vehicle is imbedded. Where the albumin fusion protein can be produced intact from recombinant cells, e.g. retroviral vectors, the pharmaceutical preparation can comprise one or more cells which produce the albumin fusion protein.

[0523] Additional Gene Therapy Methods

[0524] Also encompassed by the invention are gene therapy methods for treating or preventing disorders, diseases and conditions. The gene therapy methods relate to the introduction of nucleic acid (DNA, RNA and antisense DNA or RNA) sequences into an animal to achieve expression of an albumin fusion protein of the invention. This method requires a polynucleotide which codes for an albumin fusion protein of the present invention operatively linked to a promoter and any other genetic elements necessary for the expression of the fusion protein by the target tissue. Such gene therapy and delivery techniques are known in the art, see, for example, WO90/11092, which is herein incorporated by reference.

[0525] Thus, for example, cells from a patient may be engineered with a polynucleotide (DNA or RNA) comprising a promoter operably linked to a polynucleotide encoding an albumin fusion protein of the present invention ex vivo, with the engineered cells then being provided to a patient to be treated with the fusion protein of the present invention. Such methods are well-known in the art. For example, see Belidegrun, A., et al., J. Natl. Cancer Inst. 85: 207-216 (1993); Ferrantini, M. et al., Cancer Research 53: 1107-1112 (1993); Ferrantini, M. et al., J. Immunology 153: 4604-4615 (1994); Kaido, T., et al., Int. J. Cancer 60: 221-229 (1995); Ogura, H., et al., Cancer Research 50: 5102-5106 (1990); Santodonato, L., et al., Human Gene Therapy 7:1-10 (1996); Santodonato, L., et al., Gene Therapy 4:1246-1255 (1997); and Zhang, J.-F. et al., Cancer Gene Therapy 3: 31-38 (1996)), which are herein incorporated by reference. In one embodiment, the cells which are engineered are arterial cells. The arterial cells may be reintroduced into the patient through direct injection to the artery, the tissues surrounding the artery, or through catheter injection.

[0526] As discussed in more detail below, the polynucleotide constructs can be delivered by any method that delivers injectable materials to the cells of an animal, such as, injection into the interstitial space of tissues (heart, muscle, skin, lung, liver, and the like). The polynucleotide constructs may be delivered in a pharmaceutically acceptable liquid or aqueous carrier.

[0527] In one embodiment, polynucleotides encoding the albumin fusion proteins of the present invention is delivered as a naked polynucleotide. The term “naked” polynucleotide, DNA or RNA refers to sequences that are free from any delivery vehicle that acts to assist, promote or facilitate entry into the cell, including viral sequences, viral particles, liposome formulations, lipofectin or precipitating agents and the like. However, polynucleotides encoding the albumin fusion proteins of the present invention can also be delivered in liposome formulations and lipofectin formulations and the like can be prepared by methods well known to those skilled in the art. Such methods are described, for example, in U.S. Pat. Nos. 5,593,972, 5,589,466, and 5,580,859, which are herein incorporated by reference.

[0528] The polynucleotide vector constructs used in the gene therapy method are preferably constructs that will not integrate into the host genome nor will they contain sequences that allow for replication. Appropriate vectors include pWLNEO, pSV2CAT, pOG44, pXTI and pSG available from Stratagene; pSVK3, pBPV, pMSG and pSVL available from Pharmacia; and pEF1/V5, pcDNA3.1, and pRc/CMV2 available from Invitrogen. Other suitable vectors will be readily apparent to the skilled artisan.

[0529] Any strong promoter known to those skilled in the art can be used for driving the expression of the polynucleotide sequence. Suitable promoters include adenoviral promoters, such as the adenoviral major late promoter; or heterologous promoters, such as the cytomegalovirus (CMV) promoter; the respiratory syncytial virus (RSV) promoter; inducible promoters, such as the MMT promoter, the metallothionein promoter; heat shock promoters; the albumin promoter; the ApoAl promoter; human globin promoters; viral thymidine kinase promoters, such as the Herpes Simplex thymidine kinase promoter; retroviral LTRs; the b-actin promoter; and human growth hormone promoters. The promoter also may be the native promoter for the gene corresponding to the Therapeutic protein portion of the albumin fusion proteins of the invention.

[0530] Unlike other gene therapy techniques, one major advantage of introducing naked nucleic acid sequences into target cells is the transitory nature of the polynucleotide synthesis in the cells. Studies have shown that non-replicating DNA sequences can be introduced into cells to provide production of the desired polypeptide for periods of up to six months.

[0531] The polynucleotide construct can be delivered to the interstitial space of tissues within the an animal, including of muscle, skin, brain, lung, liver, spleen, bone marrow, thymus, heart, lymph, blood, bone, cartilage, pancreas, kidney, gall bladder, stomach, intestine, testis, ovary, uterus, rectum, nervous system, eye, gland, and connective tissue. Interstitial space of the tissues comprises the intercellular, fluid, mucopolysaccharide matrix among the reticular fibers of organ tissues, elastic fibers in the walls of vessels or chambers, collagen fibers of fibrous tissues, or that same matrix within connective tissue ensheathing muscle cells or in the lacunae of bone. It is similarly the space occupied by the plasma of the circulation and the lymph fluid of the lymphatic channels. Delivery to the interstitial space of muscle tissue is preferred for the reasons discussed below. They may be conveniently delivered by injection into the tissues comprising these cells. They are preferably delivered to and expressed in persistent, non-dividing cells which are differentiated, although delivery and expression may be achieved in non-differentiated or less completely differentiated cells, such as, for example, stem cells of blood or skin fibroblasts. In vivo muscle cells are particularly competent in their ability to take up and express polynucleotides.

[0532] For the naked nucleic acid sequence injection, an effective dosage amount of DNA or RNA will be in the range of from about 0.05 mg/kg body weight to about 50 mg/kg body weight. Preferably the dosage will be from about 0.005 mg/kg to about 20 mg/kg and more preferably from about 0.05 mg/kg to about 5 mg/kg. Of course, as the artisan of ordinary skill will appreciate, this dosage will vary according to the tissue site of injection. The appropriate and effective dosage of nucleic acid sequence can readily be determined by those of ordinary skill in the art and may depend on the condition being treated and the route of administration.

[0533] The preferred route of administration is by the parenteral route of injection into the interstitial space of tissues. However, other parenteral routes may also be used, such as, inhalation of an aerosol formulation particularly for delivery to lungs or bronchial tissues, throat or mucous membranes of the nose. In addition, naked DNA constructs can be delivered to arteries during angioplasty by the catheter used in the procedure.

[0534] The naked polynucleotides are delivered by any method known in the art, including, but not limited to, direct needle injection at the delivery site, intravenous injection, topical administration, catheter infusion, and so-called “gene guns”. These delivery methods are known in the art.

[0535] The constructs may also be delivered with delivery vehicles such as viral sequences, viral particles, liposome formulations, lipofectin, precipitating agents, etc. Such methods of delivery are known in the art.

[0536] In certain embodiments, the polynucleotide constructs are complexed in a liposome preparation. Liposomal preparations for use in the instant invention include cationic (positively charged), anionic (negatively charged) and neutral preparations. However, cationic liposomes are particularly preferred because a tight charge complex can be formed between the cationic liposome and the polyanionic nucleic acid. Cationic liposomes have been shown to mediate intracellular delivery of plasmid DNA (Felgner et al., Proc. Natl. Acad. Sci. USA (1987) 84:7413-7416, which is herein incorporated by reference); mRNA (Malone et al., Proc. Natl. Acad. Sci. USA (1989) 86:6077-6081, which is herein incorporated by reference); and purified transcription factors (Debs et al., J. Biol. Chem. (1990) 265:10189-10192, which is herein incorporated by reference), in functional form.

[0537] Cationic liposomes are readily available. For example, N[1-2,3-dioleyloxy)propyl]-N,N,N-triethylammonium (DOTMA) liposomes are particularly useful and are available under the trademark Lipofectin, from GIBCO BRL, Grand Island, N.Y. (See, also, Felgner et al., Proc. Natl Acad. Sci. USA (1987) 84:7413-7416, which is herein incorporated by reference). Other commercially available liposomes include transfectace (DDAB/DOPE) and DOTAP/DOPE (Boehringer).

[0538] Other cationic liposomes can be prepared from readily available materials using techniques well known in the art. See, e.g. PCT Publication No. WO 90/11092 (which is herein incorporated by reference) for a description of the synthesis of DOTAP (1,2-bis(oleoyloxy)-3-(trimethylammonio)propane) liposomes. Preparation of DOTMA liposomes is explained in the literature, see, e.g., P. Felgner et al., Proc. Natl. Acad. Sci. USA 84:7413-7417, which is herein incorporated by reference. Similar methods can be used to prepare liposomes from other cationic lipid materials.

[0539] Similarly, anionic and neutral liposomes are readily available, such as from Avanti Polar Lipids (Birmingham, Ala.), or can be easily prepared using readily available materials. Such materials include phosphatidyl, choline, cholesterol, phosphatidyl ethanolamine, dioleoylphosphatidyl choline (DOPC), dioleoylphosphatidyl glycerol (DOPG), dioleoylphoshatidyl ethanolamine (DOPE), among others. These materials can also be mixed with the DOTMA and DOTAP starting materials in appropriate ratios. Methods for making liposomes using these materials are well known in the art.

[0540] For example, commercially dioleoylphosphatidyl choline (DOPC), dioleoylphosphatidyl glycerol (DOPG), and dioleoylphosphatidyl ethanolamine (DOPE) can be used in various combinations to make conventional liposomes, with or without the addition of cholesterol. Thus, for example, DOPG/DOPC vesicles can be prepared by drying 50 mg each of DOPG and DOPC under a stream of nitrogen gas into a sonication vial. The sample is placed under a vacuum pump overnight and is hydrated the following day with deionized water. The sample is then sonicated for 2 hours in a capped vial, using a Heat Systems model 350 sonicator equipped with an inverted cup (bath type) probe at the maximum setting while the bath is circulated at 15EC. Alternatively, negatively charged vesicles can be prepared without sonication to produce multilamellar vesicles or by extrusion through nucleopore membranes to produce unilamellar vesicles of discrete size. Other methods are known and available to those of skill in the art.

[0541] The liposomes can comprise multilamellar vesicles (MLVs), small unilametiar vesicles (SUVs), or large unilamelar vesicles (LUVs), with SUVs being preferred. The various liposome-nucleic acid complexes are prepared using methods well known in the art. See, e.g., Straubinger et al., Methods of Immunology (1983), 101:512-527, which is herein incorporated by reference. For example, MLVs containing nucleic acid can be prepared by depositing a thin film of phospholipid on the walls of a glass tube and subsequently hydrating with a solution of the material to be encapsulated. SUVs are prepared by extended sonication of MLVs to produce a homogeneous population of unilametiar liposomes. The material to be entrapped is added to a suspension of preformed MLVs and then sonicated. When using liposomes containing cationic lipids, the dried lipid film is resuspended in an appropriate solution such as sterile water or an isotonic buffer solution such as 10 mM Tris/NaCl, sonicated, and then the preformed liposomes are mixed directly with the DNA. The liposome and DNA form a very stable complex due to binding of the positively charged liposomes to the cationic DNA. SUVs find use with small nucleic acid fragments. LUVs are prepared by a number of methods, well known in the art. Commonly used methods include Ca²⁺-EDTA chelation (Papahadjopoulos et al., Biochim. Biophys. Acta (1975) 394:483; Wilson et al., Cell 17:77 (1979)); ether injection (Deamer, D. and Bangham, A., Biochim. Biophys. Acta 443:629 (1976); Ostro et al., Biochem. Biophys. Res. Commun. 76:836 (1977); Fraley et al., Proc. Natl. Acad. Sci. USA 76:3348 (1979)); detergent dialysis (Enoch, H. and Strittmatter, P., Proc. Natl. Acad. Sci. USA 76:145 (1979)); and reverse-phase evaporation (REV) (Fraley et al., J. Biol. Chem. 255:10431 (1980); Szoka, F. and Papahadjopoulos, D., Proc. Natl. Acad. Sci. USA 75:145 (1978); Schaefer-Ridder et al., Science 215:166 (1982)), which are herein incorporated by reference.

[0542] Generally, the ratio of DNA to liposomes will be from about 10:1 to about 1:10. Preferably, the ration will be from about 5:1 to about 1:5. More preferably, the ration will be about 3:1 to about 1:3. Still more preferably, the ratio will be about 1:1.

[0543] U.S. Pat. No. 5,676,954 (which is herein incorporated by reference) reports on the injection of genetic material, complexed with cationic liposomes carriers, into mice. U.S. Pat. Nos. 4,897,355, 4,946,787, 5,049,386, 5,459,127, 5,589,466, 5,693,622, 5,580,859, 5,703,055, and international publication no. WO 94/9469 (which are herein incorporated by reference) provide cationic lipids for use in transfecting DNA into cells and mammals. U.S. Pat. Nos. 5,589,466, 5,693,622, 5,580,859, 5,703,055, and international publication no. WO 94/9469 provide methods for delivering DNA-cationic lipid complexes to mammals.

[0544] In certain embodiments, cells are engineered, ex vivo or in vivo, using a retroviral particle containing RNA which comprises a sequence encoding an albumin fusion protein of the present invention. Retroviruses from which the retroviral plasmid vectors may be derived include, but are not limited to, Moloney Murine Leukemia Virus, spleen necrosis virus, Rous sarcoma Virus, Harvey Sarcoma Virus, avian leukosis virus, gibbon ape leukemia virus, human immunodeficiency virus, Myeloproliferative Sarcoma Virus, and mammary tumor virus.

[0545] The retroviral plasmid vector is employed to transduce packaging cell lines to form producer cell lines. Examples of packaging cells which may be transfected include, but are not limited to, the PE501, PA317, R-2, R-AM, PA12, T19-14X, VT-19-17-H2, RCRE, RCRIP, GP+E-86, GP+envAm12, and DAN cell lines as described in Miller, Human Gene Therapy 1:5-14 (1990), which is incorporated herein by reference in its entirety. The vector may transduce the packaging cells through any means known in the art. Such means include, but are not limited to, electroporation, the use of liposomes, and CaPO₄ precipitation. In one alternative, the retroviral plasmid vector may be encapsulated into a liposome, or coupled to a lipid, and then administered to a host.

[0546] The producer cell line generates infectious retroviral vector particles which include polynucleotide encoding an albumin fusion protein of the present invention. Such retroviral vector particles then may be employed, to transduce eukaryotic cells, either in vitro or in vivo. The transduced eukaryotic cells will express a fusion protin of the present invention.

[0547] In certain other embodiments, ceis. are engineered, ex vivo or in vivo, with polynucleotide contained in an adenovirus vector. Adenovirus can be manipulated such that it encodes and expresses fusion protein of the present invention, and at the same time is inactivated in terms of its ability to replicate in a normal lytic viral life cycle. Adenovirus expression is achieved without integration of the viral DNA into the host cell chromosome, thereby alleviating concerns about insertional mutagenesis. Furthermore, adenoviruses have been used as live enteric vaccines for many years with an excellent safety profile (Schwartz et al. Am. Rev. Respir. Dis.109:233-238 (1974)). Finally, adenovirus mediated gene transfer has been demonstrated in a number of instances including transfer of alpha-1-antitrypsin and CFTR to the lungs of cotton rats (Rosenfeld, M. A. et al. (1991) Science 252:431-434; Rosenfeld et al, (1992) Cell 68:143-155). Furthermore, extensive studies to attempt. to establish adenovirus as a causative agent in human cancer were uniformly negative (Green, M. et al. (1979) Proc. Natl. Acad. Sci. USA 76:6606).

[0548] Suitable adenoviral vectors useful in the present invention are described, for example, in Kozarsky and Wilson, Curr. Opin. Genet. Devel. 3:499-503 (1993); Rosenfeld et al., Cell 68:143-155 (1992); Engelhardt et al., Human Genet. Ther. 4:759-769 (1993); Yang et al., Nature Genet. 7:362-369 (1994); Wilson et al., Nature 365:691-692 (1993); and U.S. Pat. No. 5,652,224, which are herein incorporated by reference. For example, the adenovirus vector Ad2 is useful and can be grown in human 293 cells. These cells contain the E1 region of adenovirus and constitutively express E1a and E1b, which complement the defective adenoviruses by providing the products of the genes deleted from the vector. In addition to Ad2, other varieties of adenovirus (e.g., Ad3, Ad5, and Ad7) are also useful invention.

[0549] Preferably, the adenoviruses used in the present invention are replication deficient. Replication deficient adenoviruses require the aid of a helper virus and/or packaging cell line to form infectious particles. The resulting virus is capable of infecting cells and can express a polynucleotide of interest which is operably linked to a promoter, but cannot replicate in most cells. Replication deficient adenoviruses may be deleted in one or more of all or a portion of the following genes: E1a, E1b, E3, E4, E2a, or L1 through L5.

[0550] In certain other embodiments, the cells are engineered, ex vivo or in vivo, using an adeno-associated virus (AAV). AAVs are naturally occurring defective viruses that require helper viruses to produce infectious particles (Muzyczka, N., Curr. Topics in Microbiol. Immunol. 158:97 (1992)). It is also one of the few viruses that may integrate its DNA into non-dividing cells. Vectors containing as little as 300 base pairs of AAV can be packaged and can integrate, but space for exogenous DNA is limited to about 4.5 kb. Methods for producing and using such AAVs are known in the art. See, for example, U.S. Pat. Nos. 5,139,941, 5,173,414, 5,354,678, 5,436,146, 5,474,935, 5,478,745, and 5,589,377.

[0551] For example, an appropriate AAV vector for use in the present invention will include all the sequences necessary for DNA replication, en capsidation, and host-cell integration. The polynucleotide construct is inserted into the AAV vector using standard cloning methods, such as those found in Sambrook et al., Molecular Cloning: A Laboratory Manual, Cold Spring Harbor Press (1989). The recombinant AAV vector is then transfected into packaging cells which are infected with a helper virus, using any standard technique, including lipofection, electroporation, calcium phosphate precipitation, etc. Appropriate helper viruses include adenoviruses, cytomegaloviruses, vaccinia viruses, or herpes viruses. Once the packaging cells are transfected and infected, they will produce infectious AAV viral particles which contain the polynucleotide construct. These viral particles are then used to transduce eukaryotic cells, either ex vivo or in vivo. The transduced cells will contain the polynucleotide construct integrated into its genome, and will express a fsuion protein of the invention.

[0552] Another method of gene therapy involves operably associating heterologous control regions and endogenous polynucleotide sequences (e.g. encoding a polypeptide of the present invention) via homologous recombination (see, e.g., U.S. Pat. No. 5,641,670, issued Jun. 24, 1997; International Publication No. WO 96/29411, published Sep. 26, 1996; International Publication No. WO 94/12650, published Aug. 4, 1994; Koller et al., Proc. Natl. Acad. Sci. USA 86:8932-8935 (1989); and Zijlstra et al., Nature 342:435-438 (1989), which are herein encorporated by reference. This method involves the activation of a gene which is present in the target cells, but which is not normally expressed in the cells, or is expressed at a lower level than desired.

[0553] Polynucleotide constructs are made, using standard techniques known in the art, which contain the promoter with targeting sequences flanking the promoter. Suitable promoters are described herein. The targeting sequence is sufficiently complementary to an endogenous sequence to permit homologous recombination of the promoter-targeting sequence with the endogenous sequence. The targeting sequence will be sufficiently near the 5′ end of the desired endogenous polynucleotide sequence so the promoter will be operably linked to the endogenous sequence upon homologous recombination.

[0554] The promoter and the targeting sequences can be amplified using PCR. Preferably, the amplified promoter contains distinct restriction enzyme sites on the 5′ and 3′ ends. Preferably, the 3′ end of the fust targeting sequence contains the same restriction enzyme site as the 5′ end of the amplified promoter and the 5′ end of the second targeting sequence contains the same restriction site as the 3′ end of the amplified promoter. The amplified promoter and targeting sequences are digested and ligated together.

[0555] The promoter-targeting sequence construct is delivered to the cells, either as naked polynucleotide, or in conjunction with transfection-facilitating agents, such as liposomes, viral sequences, viral particles, whole viruses, lipofection, precipitating agents, etc., described in more detail above. The P promoter-targeting sequence can be delivered by any method, included direct needle injection, intravenous injection, topical administration, catheter infusion, particle accelerators, etc. The methods are described in more detail below.

[0556] The promoter-targeting sequence construct is taken up by cells. Homologous recombination between the construct and the endogenous sequence takes place, such that an endogenous sequence is placed under the control of the promoter. The promoter then drives the expression of the endogenous sequence.

[0557] The polynucleotide encoding an albumin fusion protein of the present invention may contain a secretory signal sequence that facilitates secretion of the protein. Typically, the signal sequence is positioned in the coding region of the polynucleotide to be expressed towards or at the 5′ end of the coding region. The signal sequence may be homologous or heterologous to the polynucleotide of interest and may be homologous or heterologous to the cells to be transfected. Additionally, the signal sequence may be chemically synthesized using methods known in the art.

[0558] Any mode of administration of any of the above-described polynucleotides constructs can be used so long as the mode results in the expression of one or more molecules in an amount sufficient to provide a therapeutic effect. This includes direct needle injection, systemic injection, catheter infusion, biolistic injectors, particle accelerators (i.e., “gene guns”), gelfoam sponge depots, other commercially available depot materials, osmotic pumps (e.g., Alza minipumps), oral or suppositorial solid (tablet or pill) pharmaceutical formulations, and decanting or topical applications during surgery. For example, direct injection of naked calcium phosphate-precipitated plasmid into rat liver and rat spleen or a protein-coated plasmid into the portal vein has resulted in gene expression of the foreign gene in the rat livers (Kaneda et al., Science 243:375 (1989)).

[0559] A preferred method of local administration is by direct injection. Preferably, an albumin fusion protein of the present invention complexed with a delivery vehicle is administered by direct injection into or locally within the area of arteries. Administration of a composition locally within the area of arteries refers to injecting the composition centimeters and preferably, millimeters within arteries.

[0560] Another method of local administration is to contact a polynucleotide construct of the present invention in or around a surgical wound. For example, a patient can undergo surgery and the polynucleotide construct can be coated on the surface of tissue inside the wound or the construct can be injected into areas of tissue inside the wound.

[0561] Therapeutic compositions useful in systemic administration, include fusion proteins of the present invention complexed to a targeted delivery vehicle of the present invention. Suitable delivery vehicles for use with systemic administration comprise liposomes comprising ligands for targeting the vehicle to a particular site. In specific embodiments, suitable delivery vehicles for use with systemic administration comprise liposomes comprising albumin fusion proteins of the invention for targeting the vehicle to a particular site.

[0562] Preferred methods of systemic administration, include intravenous injection, aerosol, oral and percutaneous (topical) delivery. Intravenous injections can be performed using methods standard in the art. Aerosol delivery can also be performed using methods standard in the art (see, for example, Stribling et al., Proc. Natl. Acad. Sci. USA 189:11277-11281, 1992, which is incorporated herein by reference). Oral delivery can be performed by complexing a polynucleotide construct of the present invention to a carrier capable of withstanding degradation by digestive enzymes in the gut of an animal. Examples of such carriers, include plastic capsules or tablets, such as those known in the art. Topical delivery can be performed by mixing a polynucleotide construct of the present invention with a lipophilic reagent (e.g., DMSO) that is capable of passing into the skin.

[0563] Determining an effective amount of substance to be delivered can depend upon a number of factors including, for example, the chemical structure and biological activity of the substance, the age and weight of the animal, the precise condition requiring treatment and its severity, and the route of administration. The frequency of treatments depends upon a number of factors, such as the amount of polynucleotide constructs administered per dose, as well as the health and history of the subject. The precise amount, number of doses, and timing of doses will be determined by the attending physician or veterinarian.

[0564] Albumin fusion proteins of the present invention can be administered to any animal, preferably to mammals and birds. Preferred mammals include humans, dogs, cats, mice, rats, rabbits sheep, cattle, horses and pigs, with humans being particularly preferred.

[0565] Biological Activities

[0566] Albumin fusion proteins and/or polynucleotides encoding albumin fusion proteins of the present invention, can be used in assays to test for one or more biological activities. If an albumin fusion protein and/or polynucleotide exhibits an activity in a particular assay, it is likely that the Therapeutic protein corresponding to the fusion portein may be involved in the diseases associated with the biological activity. Thus, the fusion protein could be used to treat the associated disease.

[0567] Members of the secreted family of proteins are believed to be involved in biological activities associated with, for example, cellular signaling. Accordingly, albumin fusion proteins of the invention and polynucleotides encoding these protiens, may be used in diagnosis, prognosis, prevention and/or treatment of diseases and/or disorders associated with aberrant activity of secreted polypeptides.

[0568] In preferred embodiments, fusion proteins of the present invention may be used in the diagnosis, prognosis, prevention and/or treatment of diseases and/or disorders relating to diseases and disorders of the endocrine system, the nervous system (See, for example, “Neurological Disorders” section below), and the immune system (See, for example, “Immune Activity” section below), respiratory system (See, for example, “Respiratory Disorders” section below), cardiovascular system (See, for example, “Cardiovascular Disorders” section below), reproductive system (See, for example, “Reproductive System Disorders” section below) digestive system (See, for example, “Gastrointestinal Disorders” section below), diseases and/or disorders relating to cell proliferation (See, for example, “Hyperproliferative Disorders” section below), and/or diseases or disorders relating to the blood ((See, for example, “Blood-Related Disorders” section below).

[0569] In preferred embodiments, the present invention encompasses a method of treating a disease or disorder listed in the “Preferred Indication Y” column of Table 1 comprising administering to a patient in which such treatment, prevention or amelioration is desired an albumin fusion protein of the invention that comprises a Therapeutic protein portion corresponding to a Therapeutic protein disclosed in the “Therapeutic Protein X” column of Table 1 (in the same row as the disease or disorder to be treated is listed in the “Preferred Indication Y” column of Table 1) in an amount effective to treat, prevent or ameliorate the disease or disorder.

[0570] In certain embodiments, a Therapeutic protein having a “Cancer” recitation in the “Preferred Indication” column of Table 1, an albumin fusion protein that comprises a Therapeutic protein portion corresponding to a Therapeutic protein, and fragments and variants thereof, may be used to treat a disease and/or disorder relating to a neoplastic disease (e.g., leukemia, cancer, and/or as described below under “Hyperproliferative Disorders”).

[0571] In additional embodiments, a Therapeutic protein having a “Cancer” recitation in the “Preferred Indication” column of Table 1, an albumin fusion protein that comprises a Therapeutic protein portion corresponding to this Therapeutic protein, and fragments and variants thereof, may be used to treat a neoplasm located in a tissue selected from the group consisting of: colon, abdomen, bone, breast, digestive system, liver, pancreas, prostate, peritoneum, lung, blood (e.g., leukemia), endocrine glands (adrenal, parathyroid, pituitary, testicles, ovary, thymus, thyroid), uterus, eye, head and neck, nervous (central and peripheral), lymphatic system, pelvic, skin, soft tissue, spleen, thoracic, and urogenital.

[0572] In other embodiments, a Therapeutic protein having a “Cancer” recitation in the “Preferred Indication” column of Table 1, an albumin fusion protein that comprises a Therapeutic protein portion corresponding to this Therapeutic protein, and fragments and variants thereof, may be used to treat a pre-neoplastic condition, selected from the group consisting of: hyperplasia (e.g., endometrial hyperplasia and/or as described in the section entitled “Hyperproliferative Disorders”), metaplasia (e.g., connective tissue metaplasia, atypical metaplasia, and/or as described in the section entitled “Hyperproliferative Disorders”), and dysplasia (e.g., cervical dysplasia, and bronchopulmonary dysplasia).

[0573] In additional embodiments, a Therapeutic protein having a “Cancer” recitation in the “Preferred Indication” column of Table 1, an albumin fusion protein that comprises a Therapeutic protein portion corresponding to this Therapeutic protein, and fragments and variants thereof, may be used to treat a benign dysproliferative disorder selected from the group consisting of: benign tumors, fibrocystic conditions, tissue hypertrophy, and/or as described in the section entitled “Hyperproliferative Disorders”.

[0574] In certain embodiments, a Therapeutic protein having a “Immune/Hematopoietic” recitation in the “Preferred Indication” column of Table 1, an albumin fusion protein that comprises a Therapeutic protein portion corresponding to this Therapeutic protein, and fragments and variants thereof, may be used to treat a disease and/or disorder relating to a neoplastic disease (e.g., as described below under “Hyperproliferative Disorders”), a blood disorder (e.g., as described below under “Immune Activity”, “Cardiovascular Disorders” and/or “Blood-Related Disorders”), and/or an infection (e.g., as described below under “Infectious Disease”).

[0575] In additional embodiments, a Therapeutic protein having a “Immune/Hematopoietic” recitation in the “Preferred Indication” column of Table 1, an albumin fusion protein that comprises a Therapeutic protein portion corresponding to this Therapeutic protein, and fragments and variants thereof, may be used to treat a disease and/or disorder selected from the group consisting of: anemia, pancytopenia, leukopenia, thrombocytopenia, leukemias, Hodgkin's disease, non-Hodgkin's lymphoma, acute lymphocytic anemia (ALL), plasmacytomas, multiple myeloma, Burkitt's lymphoma, arritis, asthma, AIDS, autoimmune disease, rheumatoid ahritis, granuldmatous disease, immune deficiency, inflammatory bowel disease, sepsis, neutropenia, neutrophilia, psoriasis, an immune reaction to a transplanted organ and/or tissue, systemic lupus erythematosis, hemophilia, hypercoagulation, diabetes melitus, endocarditis, meningitis, Lyme Disease, and allergies.

[0576] In other embodiments, a Therapeutic protein having a “Reproductive” recitation in the “Preferred Indication” column of Table 1, an albumin fusion protein that comprises a Therapeutic protein portion corresponding to this Therapeutic protein, and fragments and variants thereof, may be used to treat a disease and/or disorder relating to a neoplastic disease (e.g., as described below under “Hyperproliferative Disorders”), and/or a disorder of the reproductive system (e.g., as described below under “Reproductive System Disorders”).

[0577] In additional embodiments, a Therapeutic protein having a “Reproductive” recitation in the “Preferred Indication” column of Table 1, an albumin fusion protein that comprises a Therapeutic protein portion corresponding to this Therapeutic protein, and fragments and variants thereof, may be used to treat a disease and/or disorder selected from the group consisting of: cryptorchism, prostatitis, inguinal hernia, varicocele, a leydig cell tumor, verrucous carcinoma, prostatitis, malacoplakia, Peyronie's disease, penile carcinoma, squamous cell hyperplasia, dysmenorrhea, ovarian adenocarcinoma, Turner's syndrome, mucopurulent cervicitis, a Sertoli-leydig tumor, ovarian cancer, uterine cancer, pelvic inflammatory disease, testicular cancer, prostate cancer, Klinefelter's syndrome, Young's syndrome, premature ejaculation, diabetes mellitus, cystic fibrosis, Kartagener's syndrome, testicular atrophy, testicular feminization, anorchia, ectopic testis, epididymitis, orchitis, gonorrhea, syphilis, testicular torsion, vasitis nodosa, a germ cell tumor, a stromal tumor, dysmenorrhea, retroverted uterus, endometriosis, fibroids, adenomyosis, anovulatory bleeding, amenorrhea, Cushing's syndrome, a hydatidiform mole, Asherman's syndrome, premature menopause, precocious puberty, uterine polyps, dysfunctional uterine bleeding, cervicitis, chronic cervicitis, mucopurulent cervicitis, cervical dysplasia, cervical polyps, Nabothian cysts, cervical erosion, cervical incompetence, a cervical neoplasm, pseudohermaphroditism, and premenstrual syndrome.

[0578] In other embodiments, a Therapeutic protein having a “Musculoskeletal” recitation in the “Preferred Indication” column of Table 1, an albumin fusion protein that comprises a Therapeutic protein portion corresponding to this Therapeutic protein, and fragments and variants thereof, may be used to treat a disease and/or disorder relating to a neoplastic disease (e.g., as described below under “Hyperproliferative Disorders”), and/or a disorder of the immune system (e.g., as described below under “Immune Activity”).

[0579] In further embodiments, a Therapeutic protein having a “Musculoskeletal” recitation in the “Preferred Indication” column of Table 1, an albumin fusion protein that comprises a Therapeutic protein portion corresponding to this Therapeutic protein, and fragments and variants thereof, may be used to treat a disease and/or disorder selected from the group consisting of: bone cancer (e.g., osteochondroma, benign chondroma, chondroblastoma, chondromyxoid fibroma, osteoid osteoma, giant cell tumor, multiple myeloma, and osteosarcoma), Paget's Disease, rheumatoid arritis, systemic lupus erythematosus, osteomyelitis, Lyme Disease, gout, bursitis, tendonitis, osteoporosis, osteoarthritis, muscular dystrophy, mitochondrial myopathy, cachexia, and multiple sclerosis.

[0580] In other embodiments, a Therapeutic protein having a “Cardiovascular” recitation in the “Preferred Indication” column of Table 1, an albumin fusion protein that comprises a Therapeutic protein portion corresponding to this Therapeutic protein, and fragments and variants thereof, may be used to treat a disease and/or disorder relating to a neoplastic disease (e.g., as described below under “Hyperproliferative Disorders”), and/or a disorder of the cardiovascular system (e.g., as described below under “Cardiovascular Disorders”).

[0581] In additional embodiments, a Therapeutic protein having a “Cardiovascular” recitation in the “Preferred Indication” column of Table 1, an albumin fusion protein that comprises a Therapeutic protein portion corresponding to this Therapeutic protein, and fragments and variants thereof, may be used to treat a disease and/or disorder selected from the group consisting of: myxoma, fibroma, rhabdomyoma, cardiovascular abnormality (e.g., a congenital heart defect, cerebral arteriovenous malformation, septal defect), heart disease (e.g., heart failure, congestive heart disease, arrhythmia, tachycardia, fibrillation, pericardial Disease, endocarditis), cardiac arrest, heart valve disease (e.g., stenosis, regurgitation, prolapse), vascular disease (e.g., hypertension, coronary artery disease, angina, aneurysm, arteriosclerosis, peripheral vascular disease), hyponatremia, hypernatremia, hypokalemia, and hyperkalemia.

[0582] In other embodiments, a Therapeutic protein having a “Mixed Fetal” recitation in the “Preferred Indication” column of Table 1, an albumin fusion protein that comprises a Therapeutic protein portion corresponding to this Therapeutic protein, and fragments and variants thereof, may be used to treat a disease and/or disorder relating to a neoplastic disease (e.g., as described below under “Hyperproliferative Disorders”).

[0583] In further embodiments, a Therapeutic protein having a “Mixed Fetal” recitation in the “Preferred Indication” column of Table 1, an albumin fusion protein that comprises a Therapeutic protein portion corresponding to this Therapeutic protein, and fragments and variants thereof, may be used to treat a disease and/or disorder selected from the group consisting of: spina bifida, hydranencephaly, neurofibromatosis, fetal alcohol syndrome, diabetes mellitus, PKU, Down's syndrome, Patau syndrome, Edwards syndrome, Turner syndrome, Apert syndrome, Carpenter syndrome, Conradi syndrome, Crouzon syndrome, cutis laxa, Cornelia de Lange syndrome, Ellis-van Creveld syndrome, Holt-Oram syndrome, Kartagener syndrome, Meckel-Gruber syndrome, Noonan syndrome, Pallister-Hall syndrome, Rubinstein-Taybi syndrome, Scimitar syndrome, Smith-Lemli-Opitz syndrome, thromocytopenia-absent radius (TAR) syndrome, Treacher Collins syndrome, Williams syndrome, Hirschsprung's disease, Meckel's diverticulum, polycystic kidney disease, Turner's syndrome, and gonadal dysgenesis, Klippel-Feil syndrome, Ostogenesis imperfecta, muscular dystrophy, Tay-Sachs disease, Wilm's tumor, neuroblastoma, and retinoblastoma.

[0584] In further embodiments, a Therapeutic protein having a “Excretory” recitation in the “Preferred Indication” column of Table 1, an albumin fusion protein that comprises a Therapeutic protein portion corresponding to this Therapeutic protein, and fragments and variants thereof, may be used to treat a disease and/or disorder relating to a neoplastic disease (e.g., as described below under “Hyperproliferative Disorders”) and/or a renal disorder (e.g., as described below under “Renal Disorders”).

[0585] In other embodiments, a Therapeutic protein having a “Excretory” recitation in the “Preferred Indication” column of Table 1, an albumin fusion protein that comprises a Therapeutic protein portion corresponding to this Therapeutic protein, and fragments and variants thereof, may be used to treat a disease and/or disorder selected from the group consisting of: bladder cancer, prostate cancer, benign prostatic hyperplasia, bladder disorders (e.g., urinary incontinence, urinary retention, urinary obstruction, urinary tract Infections, interstitial cystitis, prostatitis, neurogenic bladder, hematuria), a renal disorder (e.g., hydronephrosis, proteinuria, renal failure, pyelonephritis, urolithiasis, reflux nephropathy, and unilateral obstructive uropathy).

[0586] In further embodiments, a Therapeutic protein having a “Neural/Sensory” recitation in the “Preferred Indication” column of Table 1, an albumin fusion protein that comprises a Therapeutic protein portion corresponding to this Therapeutic protein, and fragments and variants thereof, may be used to treat a disease and/or disorder relating to a neoplastic disease (e.g., as described below under “Hyperproliferative Disorders”) and/or a disease or disorder of the nervous system (e.g., as described below under “Neural Activity and Neurological Diseases”).

[0587] In other embodiments, a Therapeutic protein having a “Neural/Sensory” recitation in the “Preferred Indication” column of Table 1, an albumin fusion protein that comprises a.Therapeutic protein portion corresponding to this Therapeutic protein, and fragments and variants thereof, may be used to treat a disease and/or disorder selected from the group consisting of: brain cancer (e.g., brain stem glioma, brain tumor, central nervous system (Primary) lymphoma, central nervous system lymphoma, cerebellar astrocytoma, and cerebral astrocytoma, a neurodegenerative disorder (e.g., Alzheimer's Disease, Creutzfeldt-Jakob Disease, Parkinson's Disease, and Idiopathic Presenile Dementia), encephalomyelitis, cerebral malaria, meningitis, a metabolic brain disease (e.g., phenylketonuria and pyruvate carboxylase deficiency), cerebellar ataxia, ataxia telangiectasia, and AIDS Dementia Complex, schizophrenia, attention deficit disorder, hyperactive attention deficit disorder, autism, and an obsessive compulsive disorder.

[0588] In other embodiments, a Therapeutic protein having a “Respiratory” recitation in the “Preferred Indication” column of Table 1, an albumin fusion protein that comprises a Therapeutic protein portion corresponding to this Therapeutic protein, and fragments and variants thereof, may be used to treat a disease and/or disorder relating to a neoplastic disease (e.g., as described below under “Hyperproliferative Disorders”) and/or a disease or disorder of the respiratory system (e.g., as described below under “Respiratory Disorders”).

[0589] In other embodiments, a Therapeutic protein having a “Respiratory” recitation in the “Preferred Indication” column of Table 1, an albumin fusion protein that comprises a Therapeutic protein portion corresponding to this Therapeutic protein, and-fragments and variants thereof, may be used to treat a disease and/or disorder selected from the group consisting of: a cancer of the respiratory system (such as larynx cancer, pharynx cancer, trachea cancer, epiglottis cancer, lung cancer, squamous cell carcinoma, small cell (oat cell) carcinoma, large cell carcinoma, and adenocarcinoma), an allergic reaction, cystic fibrosis, sarcoidosis, histiocytosis X, an infiltrative lung disease (e.g., pulmonary fibrosis and lymphoid interstitial pneumonia), an obstructive airway disease (e.g., asthma, emphysema, chronic or acute bronchitis), an occupational lung disease (e.g., silicosis and asbestosis), pneumonia, and pleurisy.

[0590] In other embodiments, a Therapeutic protein having an “Endocrine” recitation in the “Preferred Indication” column of Table 1, an albumin fusion protein that comprises a Therapeutic protein portion corresponding to this Therapeutic protein, and fragments and variants thereof, may be used to treat a disease and/or disorder relating to a neoplastic disease (e.g., as described below under “Hyperproliferative Disorders”), a disease or disorder of the respiratory system (e.g., as described below under “Respiratory Disorders”), a renal disorder (e.g., as described below under “Renal Disorders”), and/or a disorder of the endocrine system (e.g., as described below under “Endocrine Disorders”).

[0591] In other embodiments, a Therapeutic protein having a “Endocrine” recitation in the “Preferred Indication” column of Table 1, an albumin fusion protein that comprises a Therapeutic protein portion corresponding to this Therapeutic protein, and fragments and variants thereof, may be used to treat a disease and/or disorder selected from the group consisting of: a cancer of endocrine tissues and/or organs (e.g., cancer of the hypothalamus, pituitary gland, thyroid gland, parathyroid glands, pancreas, adrenal glands, ovaries, and testes), diabetes (e.g., diabetes insipidus, type I and type II diabetes mellitus), obesity, a disorder related to pituitary glands (e.g., hyperpituitarism, hypopituitarism, and pituitary dwarfism), hypothyroidism, hyperthyroidism, goiter, reproductive disorders (e.g. male and female infertility), a disorder related to adrenal glands (e.g., Addison's Disease, corticosteroid deficiency, and Cushing's Syndrome), kidney cancer (e.g., hypernephroma, transitional cell cancer, and Wilm's tumor), diabetic nephropathy, interstitial nephritis, polycystic kidney disease, glomerulonephritis (e.g., IgM mesangial proliferative glomerulonephritis and glomerulonephritis caused by an autoimmune disorder; such as Goodpasture's syndrome), and nephrocalcinosis.

[0592] In additional embodiments, a Therapeutic protein having a “Digestive” recitation in the “Preferred Indication” column of Table 1, an albumin fusion protein that comprises a Therapeutic protein portion corresponding to this Therapeutic protein, and fragments and variants thereof, may be used to treat a disease and/or disorder relating to, for example, a neoplastic disease (e.g., as described below under “Hyperproliferative Disorders”) and/or a disease or disorder of the gastrointestinal system (e.g., as described below under “Gastrointestinal Disorders”).

[0593] In other embodiments, a Therapeutic protein having a “Digestive” recitation in the “Preferred Indication” column of Table 1, an albumin fusion protein that comprises a Therapeutic protein portion corresponding to this Therapeutic protein, and fragments and variants thereof, may be used to treat a disease and/or disorder selected from the group consisting of: ulcerative colitis, appendicitis, Crohn's disease, hepatitis, hepatic encephalopathy, portal hypertension, cholelithiasis, cancer of the digestive system (e.g., biliary tract cancer, stomach cancer, colon cancer, gastric cancer, pancreatic cancer, cancer of the bile duct, a tumor of the colon (e.g., polyps or cancers), and cirrhosis), pancreatitis, ulcerative disease, pyloric stenosis, gastroenteritis, gastritis, gastric atropy, a benign tumor of the duodenum, distension, irritable bowel syndrome, malabsorption, a congenital disorder of the small intestine, bacterial and parasitic infection, megacolon, Hirschsprung's disease, aganglionic megacolon, acquired megacolon, colitis, a anorectal disorder (e.g., anal fistulas, hemorrhoids), a congenital disorder of the liver (e.g., Wilson's disease, hemochromatosis, cystic fibrosis, biliary atresia, and alpha1-antitrypsin deficiency), portal hypertension, cholelithiasis, and jaundice.

[0594] In further embodiments, a Therapeutic protein having a “Connective/Epithelial” recitation in the “Preferred Indication” column of Table 1, an albumin fusion protein that comprises a Therapeutic protein portion corresponding to this Therapeutic protein, and fragments and variants thereof, may be used to treat a disease and/or disorder relating to a neoplastic disease (e.g., as described below under “Hyperproliferative Disorders”), a cellular and/or genetic abnormality (e.g., as described below under “Diseases at the Cellular Level”), angiogenesis (e.g., as described below under “Anti-Angiogenesis Activity”), and/or to promote or inhibit regeneration (e.g., as described below under “Regeneration”), and/or wound healing (e.g., as described below under “Wound Healing and Epithelial Cell Proliferation”).

[0595] In certain embodiments, a Therapeutic protein having a “Connective/Epithelial” recitation in the “Preferred Indication” column of Table 1, an albumin fusion protein that comprises a Therapeutic protein portion corresponding to this Therapeutic protein, and fragments and variants thereof, may be used to treat a disease and/or disorder selected from the group consisting of: connective tissue metaplasia, mixed connective tissue disease, focal epithelial hyperplasia, epithelial metaplasia, mucoepithelial dysplasia, graft v. host disease, polymyositis, cystic hyperplasia, cerebral dysplasia, tissue hypertrophy, Alzheimer's disease, lymphoproliferative disorder, Waldenstron's macroglobulinemia, Crohn's disease, pernicious anemia, idiopathic Addison's disease, glomerulonephritis, bullous pemphigoid, Sjogren's syndrome, diabetes mellitus, cystic fibrosis, osteoblastoma, osteoclastoma, osteosarcoma, chondrosarcoma, osteoporosis, osteocarthritis, periodontal disease, wound healing, relapsing polychondritis, vasculitis, polyarteritis nodosa, Wegener's granulomatosis, cellulitis, rheumatoid artritis, psoriatic arthritis, discoid lupus erythematosus, systemic lupus erythematosus, scleroderma, CREST syndrome, Sjogren's syndrome, polymyositis, dermatomyositis, mixed connective tissue disease, relapsing polychondritis, vasculitis, Henoch-Schonlein syndrome, erythema nodosum, polyarteritis nodosa, temporal (giant cell) arteritis, Takayasu's arteritis, Wegener's granulomatosis, Reiter's syndrome, Behcet's syndrome, ankylosing spondylitis, cellulitis, keloids, Ehler Danlos syndrome, Marfan syndrome, pseudoxantoma elasticum, osteogenese imperfecta, chondrodysplasias, epidermolysis bullosa, Alport syndrome, and cutis laxa.

[0596] In certain embodiments, an albumin fusion protein of the present invention may be used to diagnose and/or prognose diseases and/or disorders associated with the tissue(s) in which the gene corresponding to the Therapeutic protein portion of the fusion portien of the invention is expressed.

[0597] Thus, fusion proteins of the invention and polynucleotides encoding albumin fusion proteins of the invention are useful in the diagnosis, detection and/or treatment of diseases and/or disorders associated with activities that include, but are not limited to, prohormone activation, neurotransmitter activity, cellular signaling, cellular proliferation, cellular differentiation, and cell migration.

[0598] More generally, fusion proteins of the invention and polynucleotides encoding albumin fusion proteins of the invention may be useful for the diagnosis, prognosis, prevention and/or treatment of diseases and/or disorders associated with the following systems.

[0599] Immune Activity

[0600] Albumin fusion proteins of the invention and polynucleotides encoding albumin fusion proteins of the invention may be useful in treating, preventing, diagnosing and/or prognosing diseases, disorders, and/or conditions of the immune system, by, for example, activating or inhibiting the proliferation, differentiation, or mobilization (chemotaxis) of immune cells. Immune cells develop through a process called hematopoiesis, producing myeloid (platelets, red blood cells, neutrophils, and macrophages) and lymphoid (B and T lymphocytes) cells from pluripotent stem cells. The etiology of these immune diseases, disorders, and/or conditions may be genetic, somatic, such as cancer and some autoimmune diseases, acquired (e.g., by chemotherapy or toxins), or infectious. Moreover, fusion proteins of the invention and/or polynucleotides encoding albumin fusion proteins of the invention can be used as a marker or detector of a particular immune system disease or disorder.

[0601] In another embodiment, a fusion protein of the invention and/or polynucleotide encoding an albumin fusion protein of the invention, may be used to treat diseases and disorders of the immune system and/or to inhibit or enhance an immune response generated by cells associated with the tissue(s) in which the polypeptide of the invention is expressed.

[0602] Albumin fusion proteins of the invention and/or polynucleotides encoding albumin fusion proteins of the invention may be useful in treating, preventing, diagnosing, and/or prognosing immunodeficiencies, including both congenital and acquired immunodeficiencies. Examples of B cell immunodeficiencies in which immunoglobulin levels B cell function and/or B cell numbers are decreased include: X-linked agammaglobulinemia (Bruton's disease), X-linked infantile agammaglobulinemia, X-linked immunodeficiency with hyper IgM, non X-linked immunodeficiency with hyper IgM, X-linked lymphoproliferative syndrome (XLP), agammaglobulinemia including congenital and acquired agammaglobulinemia, adult onset agammaglobulinemia, late-onset agammaglobulinemia, dysgammaglobulinemia, hypogammaglobulinemia, unspecified hypogammaglobulinemia, recessive agammaglobulinemia (Swiss type), Selective IgM deficiency, selective IgA deficiency, selective IgG subclass deficiencies, IgG subclass deficiency (with or without IgA deficiency), Ig deficiency with increased IgM, IgG and IgA deficiency with increased IgM, antibody deficiency with normal or elevated Igs, Ig heavy chain deletions, kappa chain deficiency, B cell lymphoproliferative disorder (BLPD), common variable immunodeficiency (CVID), common variable immunodeficiency (CVI) (acquired), and transient hypogammaglobulhnemia of infancy.

[0603] In specific embodiments, ataxia-telangiectasia or conditions associated with ataxia-telangiectasia are treated, prevented, diagnosed, and/or prognosing using the, fusion proteins of the invention and/or polynucleotides encoding albumin fusion proteins of the invention.

[0604] Examples of congenital immunodeficiencies in which T cell and/or B cell function and/or number is decreased include, but are not limited to: DiGeorge anomaly, severe combined immunodeficiencies (SCID) (including, but not limited to, X-linked SCID, autosomal recessive SCID, adenosine deaminase deficiency, purine nucleoside phosphorylase (PNP) deficiency, Class II MHC deficiency (Bare lymphocyte syndrome), Wiskott-Aldrich syndrome, and ataxia telangiectasia), thymic hypoplasia, third and fourth pharyngeal pouch syndrome, 22q11.2 deletion, chronic mucocutaneous candidiasis, natural killer cell deficiency (NK), idiopathic CD4+ T-lymphocytopenia, immunodeficiency with predominant T cell defect (unspecified), and unspecified immunodeficiency of cell mediated immunity.

[0605] In specific embodiments, DiGeorge anomaly or conditions associated with DiGeorge anomaly are treated, prevented, diagnosed, and/or prognosed using fusion proteins of the invention and/or polynucleotides encoding albumin fusion proteins of the invention.

[0606] Other immunodeficiencies that may be treated, prevented, diagnosed, and/or prognosed using fusion proteins of the invention and/or polynucleotides encoding albumin fusion proteins of the invention, include, but are not limited to, chronic granulomatous disease, Chédiak-Hfigashi syndrome, myeloperoxidase deficiency, leukocyte glucose-6-phosphate dehydrogenase deficiency, X-linked lymphoproliferative syndrome (XLP), leukocyte adhesion deficiency, complement component deficiencies (including C1, C2, C3, C4, C5, C6, C7, C8 and/or C9 deficiencies), reticular dysgenesis, thymic alymphoplasia-aplasia, immunodeficiency with thymoma, severe congenital leukopenia, dysplasia with immunodeficiency, neonatal neutropenia, short limbed dwarfism, and Nezelof syndrome-combined immunodeficiency with Igs.

[0607] In a preferred embodiment, the immunodeficiencies and/or conditions associated with the immunodeficiencies recited above are treated, prevented, diagnosed and/or prognosed using fusion proteins of the invention and/or polynucleotides encoding albumin fusion proteins of the invention.

[0608] In a preferred embodiment fusion proteins of the invention and/or polynucleotides encoding albumin fusion proteins of the invention could be used as an agent to boost immunoresponsiveness among immunodeficient individuals. In specific embodiments, fusion proteins of the invention and/or polynucleotides encoding albumin fusion proteins of the invention could be used as an agent to boost immunoresponsiveness among B cell and/or T cell immunodeficient individuals.

[0609] The albumin fusion proteins of the invention and/or polynucleotides encoding albumin fusion proteins of the invention may be useful in treating, preventing, diagnosing and/or prognosing autoimmune disorders. Many autoimmune disorders result from inappropriate recognition of self as foreign material by immune cells. This inappropriate recognition results in an immune response leading to the destruction of the host tissue. Therefore, the administration of fusion proteins of the invention and/or polynucleotides encoding albumin fusion proteins of the invention that can inhibit an immune response, particularly the proliferation, differentiation, or chemotaxis of T-cells, may be an effective therapy in preventing autoimmune disorders.

[0610] Autoimmune diseases or disorders that may be treated, prevented, diagnosed and/or prognosed by fusion proteins of the invention and/or polynucleotides encoding albumin fusion proteins of the invention include, but are not limited to, one or more of the following: systemic lupus erythematosus, rheumatoid arthritis, ankylosing spondylitis, multiple sclerosis, autoimmune thyroiditis, Hashimoto's thyroiditis, autoimmune hemolytic anemia, hemolytic anemia, thrombocytopenia, autoimmune thrombocytopenia purpura, autoimmune neonatal thrombocytopenia, idiopathic thrombocytopenia purpura, purpura (e.g., Henloch-Scoenlein purpura), autoimmunocytopenia, Goodpasture's syndrome, Pemphigus vulgaris, myasthenia gravis, Grave's disease (hyperthyroidism), and insulin-resistant diabetes mellitus.

[0611] Additional disorders that are likely to have an autoimmune component that may be treated, prevented, and/or diagnosed with the albumin fusion proteins of the invention and/or polynucleotides encoding albumin fusion proteins of the invention include, but are not limited to, type II collagen-induced arthritis, antiphospholipid syndrome, dermatitis, allergic encephalomyelitis, myocarditis, relapsing polychondritis, rheumatic heart disease, neuritis, uveitis ophthalmia, polyendocrinopathies, Reiter's Disease, Stiff-Man Syndrome, autoimmune pulmonary inflammation, autism, Guillain-Barre Syndrome, insulin dependent diabetes mellitus, and autoimmune inflanmmatory eye disorders.

[0612] Additional disorders that are likely to have an autoimmune component that may be treated, prevented, diagnosed and/or prognosed with the albumin fusion proteins of the invention and/or polynucleotides encoding albumin fusion proteins of the invention include, but are not limited to, scleroderma with anti-collagen antibodies (often characterized, e.g., by nucleolar and other nuclear antibodies), mixed connective tissue disease (often characterized, e.g., by antibodies to extractable nuclear antigens (e.g., ribonucleoprotein)), polymyositis (often characterized, e.g., by nonhistone ANA), pernicious anemia (often characterized, e.g., by antiparietal cell, microsomes, and intrinsic factor antibodies), idiopathic Addison's disease (often characterized, e.g., by humoral and cell-mediated adrenal cytotoxicity, infertility (often characterized, e.g., by antispermatozoal antibodies), glomerulonephritis (often characterized, e.g., by glomerular basement membrane antibodies or immune complexes), bullous pemphigoid (often characterized, e.g.; by IgG and complement in basement membrane), Sjogren's syndrome (often characterized, e.g., by multiple tissue antibodies, and/or a specific nonhistone ANA (SS-B)), diabetes mellitus (often characterized, e.g., by cell-mediated and humoral islet cell antibodies), and adrenergic drug resistance (including adrenergic drug resistance with asthma or cystic fibrosis) (often characterized, e.g., by beta-adrenergic receptor antibodies).

[0613] Additional disorders that may have an autoimmune component that may be treated, prevented, diagnosed and/or prognosed with the albumin fusion proteins of the invention and/or polynucleotides encoding albumin fusion proteins of the invention include, but are not limited to, chronic active hepatitis (often characterized, e.g., by smooth muscle antibodies), primary biliary cirrhosis (often characterized, e.g., by mitochondria antibodies), other endocrine gland failure (often characterized, e.g., by specific tissue antibodies in some cases), vitiligo (often characterized, e.g., by melanocyte antibodies), vasculitis (often characterized, e.g., by Ig and complement in vessel walls and/or low serum complement), post-MI (often characterized, e.g., by myocardial antibodies), cardiotomy syndrome (often characterized, e.g., by myocardial antibodies), urticaria (often characterized, e.g., by IgG and IgM antibodies to IgE), atopic dermatitis (often characterized, e.g., by IgG and IgM antibodies to IgE), asthma (often characterized, e.g., by IgG and IgM antibodies to IgE), and many other inflammatory, granulomatous, degenerative, and atrophic disorders.

[0614] In a preferred embodiment, the autoimmune diseases and disorders and/or conditions associated with the diseases and disorders recited above are treated, prevented, diagnosed and/or prognosed using for example, fusion proteins of the invention and/or polynucleotides encoding albumin fusion proteins of the invention. In a specific preferred embodiment, rheumatoid arthritis is treated, prevented, and/or diagnosed using fusion proteins of the invention and/or polynucleotides encoding albumin fusion proteins of the invention.

[0615] In another specific preferred embodiment, systemic lupus erythematosus is treated, prevented, and/or diagnosed using fusion proteins of the invention and/or polynucleotides encoding albumin fusion proteins of the invention. In another specific preferred embodiment, idiopathic thrombocytopenia purpura is treated, prevented, and/or diagnosed using fusion proteins of the invention and/or polynucleotides encoding albumin fusion proteins of the invention.

[0616] In another specific preferred embodiment IgA nephropathy is treated, prevented, and/or diagnosed using fusion proteins of the invention and/or polynucleotides encoding albumin fusion proteins of the invention.

[0617] In a preferred embodiment, the autoimmune diseases and disorders and/or conditions associated with the diseases and disorders recited above are treated, prevented, diagnosed and/or prognosed using fusion proteins of the invention and/or polynucleotides encoding albumin fusion proteins of the invention.

[0618] In preferred embodiments, fusion proteins of the invention and/or polynucleotides encoding albumin fusion proteins of the invention are used as a immunosuppressive agent(s).

[0619] Albumin fusion proteins of the invention and/or polynucleotides encoding albumin fusion proteins of the invention may be usful in treating, preventing, prognosing, and/or diagnosing diseases, disorders, and/or conditions of hematopoietic cells. Albumin fusion proteins of the invention and/or polynucleotides encoding albumin fusion proteins of the invention could be used to increase differentiation and proliferation of hematopoietic cells, including the pluripotent stem cells, in an effort to treat or prevent those diseases, disorders, and/or conditions associated with a decrease in certain (or many) types hematopoietic cells, including but not limited to, leukopenia, neutropenia, anemia, and thrombocytopenia. Alternatively, fusion proteins of the invention and/or polynucleotides encoding albumin fusion proteins of the invention could be used to increase differentiation and proliferation of hematopoietic cells, including the pluripotent stem cells, in an effort to treat or prevent those diseases, disorders, and/or conditions associated with an increase in certain (or many) types of hematopoietic cells, including but not limited to, histiocytosis.

[0620] Allergic reactions and conditions, such as asthma (particularly allergic asthma) or other respiratory problems, may also be treated, prevented, diagnosed and/or prognosed using fusion proteins of the invention and/or polynucleotides encoding albumin fusion proteins of the invention. Moreover, these molecules can be used to treat, prevent, prognose, and/or diagnose anaphylaxis, hypersensitivity to an antigenic molecule, or blood group incompatibility.

[0621] Additionally, fusion proteins of the invention and/or polynucleotides encoding albumin fusion proteins of the invention, may be used to treat, prevent, diagnose and/or prognose IgE-mediated allergic reactions. Such allergic reactions include, but are not limited to, asthma; rhinitis, and eczema. In specific embodiments, fusion proteins of the invention and/or polynucleotides encoding albumin fusion proteins of the invention may be used to modulate IgE concentrations in vitro or in vivo.

[0622] Moreover, fusion proteins of the invention and/or polynucleotides encoding albumin fusion proteins of the invention have uses in the diagnosis, prognosis, prevention, and/or treatment of inflammatory conditions. For example, since fusion proteins of the invention and/or polynucleotides encoding albumin fusion proteins of the invention may inhibit the activation, proliferation and/or differentiation of cells involved in an inflammatory response, these molecules can be used to prevent and/or treat chronic and acute inflammatory conditions. Such inflammatory conditions include, but are not limited to, for example, inflammation associated with infection (e.g., septic shock, sepsis, or systemic inflammatory response syndrome), ischemia-reperfusion injury, endotoxin lethality, complement-mediated hyperacute rejection, nephritis, cytokine or chemokine induced lung injury, inflammatory bowel disease, Crohn's disease, over production of cytokines (e.g., TNF or IL-1.), respiratory disorders (e.g., asthma and allergy); gastrointestinal disorders (e.g., inflammatory bowel disease); cancers (e.g., gastric, ovarian, lung, bladder, liver, and breast); CNS disorders (e.g., multiple sclerosis; ischemic brain injury and/or stroke, traumatic brain injury, neurodegenerative disorders (e.g., Parkinson's disease and Alzheimer's disease); AIDS-related dementia; and prion disease); cardiovascular disorders (e.g., atherosclerosis, myocarditis, cardiovascular disease, and cardiopulmonary bypass complications); as well as many additional diseases, conditions, and disorders that are characterized by inflammation (e.g., hepatitis, rheumatoid arthritis, gout, trauma, pancreatitis, sarcoidosis, dermatitis, renal ischemia-reperfusion injury, Grave's disease, systemic lupus erythematosus, diabetes mellitus, and allogenic transplant rejection).

[0623] Because inflammation is a fundamental defense mechanism, inflammatory disorders can effect virtually any tissue of the body. Accordingly, fusion proteins of the invention and/or polynucleotides encoding albumin fusion proteins of the invention, have uses in the treatment of tissue-specific inflammatory disorders, including, but not limited to, adrenalitis, alveolitis, angiocholecystitis, appendicitis, balanitis, blepharitis, bronchitis, bursitis, carditis, cellulitis, cervicitis, cholecystitis, chorditis, cochlitis, colitis, conjunctivitis, cystitis, dermatitis, diverticulitis, encephalitis, endocarditis, esophagitis, eustachitis, fibrositis, folliculitis, gastritis, gastroenteritis, gingivitis, glossitis, hepatosplenitis, keratitis, labyrinthitis, laryngitis, lymphangitis, mastitis, media otitis, meningitis, metritis, mucitis, myocarditis, myosititis, myringitis, nephritis, neuritis, orchitis, osteochondritis, otitis, pericarditis, peritendonitis, peritonitis, pharyngitis, phlebitis, poliomyelitis, prostatitis, pulpitis, retinitis, rhinitis, salpingitis, scleritis, sclerochoroiditis, scrotitis, sinusitis, spondylitis, steatitis, stomatitis, synovitis, syringitis, tendonitis, tonsillitis, urethritis, and vaginitis.

[0624] In specific embodiments, fusion proteins of the invention and/or polynucleotides encoding albumin fusion proteins of the invention, are useful to diagnose, prognose, prevent, and/or treat organ transplant rejections and graft-versus-host disease. Organ rejection occurs by host immune cell destruction of the transplanted tissue through an immune response. Similarly, an immune response is also involved in GVHD, but, in this case, the foreign transplanted immune cells destroy the host tissues. Polypeptides, antibodies, or polynucleotides of the invention, and/or agonists or antagonists thereof, that inhibit an immune response, particularly the activation, proliferation, differentiation, or chemotaxis of T-cells, may be an effective therapy in preventing organ rejection or GVHD. In specific embodiments, fusion proteins of the invention and/or polynucleotides encoding albumin fusion proteins of the invention, that inhibit an immune response, particularly the activation, proliferation, differentiation, or chemotaxis of T-cells, may be an effective therapy in preventing experimental allergic and hyperacute xenograft rejection.

[0625] In other embodiments, fusion proteins of the invention and/or polynucleotides encoding albumin fusion proteins of the invention, are useful to diagnose, prognoses prevent, and/or treat immune complex diseases, including, but not limited to, serum sickness, post streptococcal glomerulonephritis, polyarteritis nodosa, and immune complex-induced vasculitis.

[0626] Albumin fusion proteins of the invention and/or polynucleotides encoding albumin fusion proteins of the invention can be used to treat, detect, and/or prevent infectious agents. For example, by increasing the immune response, particularly increasing the proliferation activation and/or differentiation of B arid/or T cells, infectious diseases may be treated, detected, and/or prevented. The immune response may be increased by either enhancing an existing immune response, or by initiating a new immune response. Alternatively, fusion proteins of the invention and/or polynucleotides encoding albumin fusion proteins of the invention may also directly inhibit the infectious agent (refer to section of application listing infectious agents, etc), without necessarily eliciting an immune response.

[0627] In another embodiment, albumin fusion proteins of the invention and/or polynucleotides encoding albumin fusion proteins of the invention are used as a vaccine adjuvant that enhances immune responsiveness to an antigen. In a specific embodiment, albumin fusion proteins of the invention and/or polynucleotides encoding albumin fusion proteins of the invention are used as an adjuvant to enhance tumor-specific immune responses.

[0628] In another specific embodiment, albumin fusion proteins of the invention and/or polynucleotides encoding albumin fusion proteins of the invention are used as an adjuvant to enhance anti-viral immune responses. Anti-viral immune responses that may be enhanced using the compositions of the invention as an adjuvant, include virus and virus associated diseases or symptoms described herein or otherwise known in the art. In specific embodiments, the-compositions of the invention are used as an adjuvant to enhance an immune response to a virus, disease, or symptom selected from the group consisting of: AIDS, meningitis, Dengue, EBV, and hepatitis (e.g., hepatitis B). In another specific embodiment, the compositions of the invention are used as an adjuvant to enhance an immune response to a virus, disease, or symptom selected from the group consisting of: HIV/AIDS, respiratory syncytial virus, Dengue, rotavirus, Japanese B encephalitis, influenza A and B, parainfluenza, measles, cytomegalovirus, rabies, Junin, Chikungunya, Rift Valley Fever, herpes simplex, and yellow fever.

[0629] In another specific embodiment, albumin fusion proteins of the invention and/or polynucleotides encoding albumin fusion proteins of the invention are used as an adjuvant to enhance anti-bacterial or anti-fungal immune responses. Anti-bacterial or anti-fungal immune responses that may be enhanced using the compositions of the invention as an adjuvant, include bacteria or fungus and bacteria or fungus associated diseases or symptoms described herein or otherwise known in the art. In specific embodiments, the compositions of the invention are used as an adjuvant to enhance an immune response to a bacteria or fungus, disease, or symptom selected from the group consisting of: tetanus, Diphtheria, botulism, and meningitis type B.

[0630] In another specific embodiment, the compositions of the invention are used as an adjuvant to enhance an immune response to a bacteria or fungus, disease, or symptom selected from the group consisting of Vibrio cholerae, Mycobacterium leprae, Salmonella typhi, Salmonella paratyphi, Meisseria meningitidis, Streptococcus pneumoniae, Group B streptococcus, Shigella spp., Enterotoxigenic Escherichia coli, Enterohemorrhagic E. coli, and Borrelia burgdorferi.

[0631] In another specific embodiment, albumin fusion proteins of the invention and/or polynucleotides encoding albumin fusion proteins of the invention are used as an adjuvant to enhance anti-parasitic immune responses. Anti-parasitic immune responses that may be enhanced using the compositions of the invention as an adjuvant, include parasite and parasite associated diseases or symptoms described herein or otherwise known in the art. In specific embodiments, the compositions of the invention are used as an adjuvant to enhance an immune response to a parasite. In another specific embodiment, the compositions of the invention are used as an adjuvant to enhance an immune response to Plasmodium (malaria) or Leishmania.

[0632] In another specific embodiment, albumin fusion proteins of the invention and/or polynucleotides encoding albumin fusion proteins of the invention may also be employed to treat infectious diseases including silicosis, sarcoidosis, and idiopathic pulmonary fibrosis; for example, by preventing the recruitment and activation of mononuclear phagocytes.

[0633] In another specific embodiment, albumin fusion proteins of the invention and/or polynucleotides encoding albumin fusion proteins of the invention are used as an antigen for the generation of antibodies to inhibit or enhance immune mediated responses against polypeptides of the invention.

[0634] In one embodiment, albumin fusion proteins of the invention and/or polynucleotides encoding albumin fusion proteins of the invention are administered to an animal (e.g., mouse, rat, rabbit, hamster, guinea pig, pigs, micro-pig, chicken, camel, goat, horse, cow, sheep, dog, cat, non-human primate, and human, most preferably human) to boost the immune system to produce increased quantities of one or more antibodies (e.g., IgG, IgA, IgM, and IgE), to induce higher affinity antibody production and immunoglobulin class switching (e.g., IgG, IgA, IgM, and IgE), and/or to increase an immune response.

[0635] In another specific embodiment, albumin fusion proteins of the invention and/or polynucleotides encoding albumin fusion proteins of the invention are used as a stimulator of B cell responsiveness to pathogens.

[0636] In another specific embodiment, albumin fusion proteins of the invention and/or polynucleotides encoding albumin fusion proteins of the invention are used as an activator of T cells.

[0637] In another specific embodiment, albumin fusion proteins of the invention and/or polynucleotides encoding albumin fusion proteins of the invention are used as an agent that elevates the immune status of an individual prior to their receipt of immunosuppressive therapies.

[0638] In another specific embodiment, albumin fusion proteins of the invention and/or polynucleotides encoding albumin fusion proteins of the invention are used as an agent to induce higher affinity antibodies.

[0639] In another specific embodiment, albumin fusion proteins of the invention and/or polynucleotides encoding albumin fusion proteins of the invention are used as an agent to increase serum immunoglobulin concentrations.

[0640] In another specific embodiment, albumin fusion proteins of the invention and/or polynucleotides encoding albumin fusion proteins of the invention are used as an agent to accelerate recovery of immunocompromised individuals.

[0641] In another specific embodiment, albumin fusion proteins of the invention and/or polynucleotides encoding albumin fusion proteins of the invention are used as an agent to boost immunoresponsiveness among aged populations and/or neonates.

[0642] In another specific embodiment, albumin fusion proteins of the invention and/or polynucleotides encoding albumin fusion proteins of the invention are used as an immune system enhancer prior to, during, or after bone marrow transplant and/or other transplants (e.g., allogeneic or xenogeneic organ transplantation). With respect to transplantation, compositions of the invention may be administered prior to, concomitant with, and/or after transplantation. In a specific embodiment, compositions of the invention are administered after transplantation, prior to the beginning of recovery of T-cell populations. In another specific embodiment, compositions of the invention are first administered after transplantation after the beginning of recovery of T cell populations, but prior to full recovery of B cell populations.

[0643] In another specific embodiment, albumin fusion proteins of the invention and/or polynucleotides encoding albumin fusion proteins of the invention are used as an agent to boost immunoresponsiveness among individuals having an acquired loss of B cell function. Conditions resulting in an acquired loss of B cell function that may be ameliorated or treated by administering the albumin fusion proteins of the invention and/or polynucleotides encoding albumin fusion proteins of the invention, include, but are not limited to, HIV Infection, AIDS, bone marrow transplant, and B cell chronic lymphocytic leukemia (CLL).

[0644] In another specific embodiment, albumin fusion proteins of the invention and/or polynucleotides encoding albumin fusion proteins of the invention are used as an agent to boost immunoresponsiveness among individuals having a temporary immune deficiency. Conditions resulting in a temporary immune deficiency that may be ameliorated or treated by administering the albumin fusion proteins of the invention and/or polynucleotides encoding albumin fusion proteins of the invention, include, but are not limited to, recovery from viral infections (e.g., influenza), conditions associated with malnutrition, recovery from infectious mononucleosis, or conditions associated with stress, recovery from measles, recovery from blood transfusion, and recovery from surgery.

[0645] In another specific embodiment, albumin fusion proteins of the invention and/or polynucleotides encoding albumin fusion proteins of the invention are used as a regulator of antigen presentation by monocytes, dendritic cells, and/or B-cells. In one embodiment, albumin fusion proteins of the invention and/or polynucleotides encoding albumin fusion proteins of the invention enhance antigen presentation or antagonizes antigen presentation in vitro or in vivo. Moreover, in related embodiments, this enhancement or antagonism of antigen presentation may be useful as an anti-tumor treatment or to modulate the immune system.

[0646] In another specific embodiment, albumin fusion proteins of the invention and/or polynucleotides encoding albumin fusion proteins of the invention are used as an agent to direct an individual's immune system towards development of a humoral response (i.e. TH2) as opposed to a TH1 cellular response.

[0647] In another specific embodiment, albumin fusion proteins of the invention and/or polynucleotides encoding albumin fusion proteins of the invention are used as a means to induce tumor proliferation and thus make it more susceptible to anti-neoplastic agents. For example, multiple myeloma is a slowly dividing disease and is thus refractory to virtually all anti-neoplastic regimens. If these cells were forced to proliferate more rapidly their susceptibility profile would likely change.

[0648] In another specific embodiment, albumin fusion proteins of the invention and/or polynucleotides encoding albumin fusion proteins of the invention are used as a stimulator of B cell production in pathologies such as AIDS, chronic lymphocyte disorder and/or Common Variable Immunodificiency.

[0649] In another specific embodiment, albumin fusion proteins of the invention and/or polynucleotides encoding albumin fusion proteins of the invention are used as a therapy for generation and/or regeneration of lymphoid tissues following surgery, trauma or genetic defect. In another specific embodiment, albumin fusion proteins of the invention and/or polynucleotides encoding albumin fusion proteins of the invention are used in the pretreatment of bone marrow samples prior to transplant.

[0650] In another specific embodiment, albumin fusion proteins of the invention and/or polynucleotides encoding albumin fusion proteins of the invention are used as a gene-based therapy for genetically inherited disorders resulting in immuno-incompetence/immunodeficiency such as observed among SCID patients.

[0651] In another specific embodiment, albumin fusion proteins of the invention and/or polynucleotides encoding albumin fusion proteins of the invention are used as a means of activating monocytes/macrophages to defend against parasitic diseases that effect monocytes such as Leishmania.

[0652] In another specific embodiment, albumin fusion proteins of the invention and/or polynucleotides encoding albumin fusion proteins of the invention are used as a means of regulating secreted cytokines that are elicited by polypeptides of the invention.

[0653] In another embodiment, albumin fusion proteins of the invention and/or polynucleotides encoding albumin fusion proteins of the invention are used in one or more of the applications decribed herein, as they may apply to veterinary medicine.

[0654] In another specific embodiment, albumin fusion proteins of the invention and/or polynucleotides encoding albumin fusion proteins of the invention are used as a means of blocking various aspects of immune responses to foreign agents or self. Examples of diseases or conditions in which blocking of certain aspects of immune responses may be desired include autoimmune disorders such as lupus, and arthritis, as well as immunoresponsiveness to skin allergies, inflammation, bowel disease, injury and diseases/disorders associated with pathogens.

[0655] In another specific embodiment, albumin fusion proteins of the invention and/or polynucleotides encoding albumin fusion proteins of the invention are used as a therapy for preventing the B cell prouiferation and Ig secretion associated with autoimmune diseases such as idiopathic thrombocytopenic purpura, systemic lupus erythematosus and multiple sclerosis.

[0656] In another specific embodiment, polypeptides, antibodies, polynucleotides and/or agonists or antagonists of the present fusion proteins of the invention and/or polynucleotides encoding albumin fusion proteins of the invention invention are used as a inhibitor of B and/or T cell migration in endothelial cells. This activity disrupts tissue architecture or cognate responses and is useful, for example in disrupting immune responses, and blocking sepsis.

[0657] In another specific embodiment, albumin fusion proteins of the invention and/or polynucleotides encoding albumin fusion proteins of the invention are used as a therapy for chronic hypergammaglobulinemia evident in such diseases as monoclonal gammopathy of undetermined significance (MGUS), Waldenstrom's disease, related idiopathic monoclonal gammopathies, and plasmacytomas.

[0658] In another specific embodiment, albumin fusion proteins of the invention and/or polynucleotides encoding albumin fusion proteins of the invention may be employed for instance to inhibit polypeptide chemotaxis and activation of macrophages and their precursors, and of neutrophils, basophils, B lymphocytes and some T-cell subsets, e.g., activated and CD8 cytotoxic T cells and natural killer cells, in certain autoimmune and chronic inflammatory and infective diseases. Examples of autoimmune diseases are described herein and include multiple sclerosis, and insulin-dependent diabetes.

[0659] The albumin fusion proteins of the invention and/or polynucleotides encoding albumin fusion proteins of the invention may also be employed to treat idiopathic hyper-eosinophilic syndrome by, for example, preventing eosinophil production and migration.

[0660] In another specific embodiment, albumin fusion proteins of the invention and/or polynucleotides encoding albumin fusion proteins of the invention are used to enhance or inhibit complement mediated cell lysis.

[0661] In another specific embodiment, albumin fusion proteins of the invention and/or polynucleotides encoding albumin fusion proteins of the invention are used to enhance or inhibit antibody dependent cellular cytotoxicity.

[0662] In another specific embodiment, albumin fusion proteins of the invention and/or polynucleotides encoding albumin fusion proteins of the invention may also be employed for treating atherosclerosis, for example, by preventing monocyte infiltration in the artery wall.

[0663] In another specific embodiment, albumin fusion proteins of the invention and/or polynucleotides encoding albumin fusion proteins of the invention may be employed to treat adult respiratory distress syndrome (ARDS).

[0664] In another specific embodiment, albumin fusion proteins of the invention and/or polynucleotides encoding albumin fusion proteins of the invention may be useful for stimulating wound and tissue repair, stimulating angiogenesis, and/or stimulating the repair of vascular or lymphatic diseases or disorders. Additionally, fusion proteins of the invention and/or polynucleotides encoding albumin fusion proteins of the invention may be used to stimulate the regeneration of mucosal surfaces.

[0665] In a specific embodiment, albumin fusion proteins of the invention and/or polynucleotides encoding albumin fusion proteins of the invention are used to diagnose, prognose, treat, and/or prevent a disorder characterized by primary or acquired immunodeficiency, deficient serum immunoglobulin production, recurrent infections, and/or immune system dysfunction. Moreover, fusion proteins of the invention and/or polynucleotides encoding albumin fusion proteins of the invention may be used to treat or prevent infections of the joints, bones, skin, and/or parotid glands, blood-borne infections (e.g., sepsis, meningitis, septic arthritis, and/or osteomyelitis), autoimmune diseases (e.g., those disclosed herein), inflammatory disorders, and malignancies, and/or any disease or disorder or condition associated with these infections, diseases, disorders and/or malignancies) including, but not lirnited to, CVID, other primary immune deficiencies, HIV disease, CLL, recurrent bronchitis, sinusitis, otitis media, conjunctivitis, pneumonia, hepatitis, meningitis, herpes zoster (e.g., severe herpes zoster), and/or pneumocystis carnii. Other diseases and disorders that may be prevented, diagnosed, prognosed, and/or treated with fusion proteins of the invention and/or polynucleotides encoding albumin fusion proteins of the invention include, but are not limited to, HIV infection, HTLV-BLV infection, lymphopenia, phagocyte bactericidal dysfunction anemia, thrombocytopenia, and hemoglobinuria.

[0666] In another embodiment, albumin fusion proteins of the invention and/or polynucleotides encoding albumin fusion proteins of the invention are used to treat, and/or diagnose an individual having common variable immunodeficiency disease (“CVID”; also known as “acquired agammaglobulinemia” and “acquired hypogammaglobulinemia”) or a subset of this disease.

[0667] In a specific embodiment, albumin fusion proteins of the invention and/or polynucleotides encoding albumin fusion proteins of the invention may be used to diagnose, prognose, prevent, and/or treat cancers or neoplasms including immune cell or immune tissue-related cancers or neoplasms. Examples of cancers or neoplasms that may be prevented, diagnosed, or treated by fusion proteins of the invention and/or polynucleotides encoding albumin fusion proteins of the invention include, but are not limited to, acute myelogenous leukemia, chronic myelogenous leukemia, Hodgkin's disease, non-Hodgkin's lymphoma, acute lymphocytic anemia (ALL) Chronic lymphocyte leukemia, plasmacytomas, multiple myeloma, Burkitt's lymphoma, EBV-transformed diseases, and/or diseases and disorders described in the section entitled “Hyperproliferative Disorders” elsewhere herein.

[0668] In another specific embodiment, albumin fusion proteins of the invention and/or polynucleotides encoding albumin fusion proteins of the invention are used as a therapy for decreasing cellular proliferation of Large B-cell Lymphomas.

[0669] In another specific embodiment, albumin fusion proteins of the invention and/or polynucleotides encoding albumin fusion proteins of the invention are used as a means of decreasing the involvement of B cells and Ig associated with Chronic Myelogenous Leukemia.

[0670] In specific embodiments, the compositions of the invention are used as an agent to boost immunoresponsiveness among B cell immunodeficient individuals, such as, for example, an individual who has undergone a partial or complete splenectomy.

[0671] Blood-Related Disorders

[0672] The albumin fusion proteins of the invention and/or polynucleotides encoding albumin fusion proteins of the invention may be used to modulate hemostatic (the stopping of bleeding) or thrombolytic (clot dissolving) activity. For example, by increasing hemostatic or thrombolytic activity, fusion proteins of the invention and/or polynucleotides encoding albumin fusion proteins of the invention could be used to treat or prevent blood coagulation diseases, disorders, and/or conditions (e.g., afibrinogenemia, factor deficiencies, hemophilia), blood platelet diseases, disorders, and/or conditions (e.g., thrombocytopenia), or wounds resulting from trauma, surgery, or other causes. Alternatively, fusion proteins of the invention and/or polynucleotides encoding albumin fusion proteins of the invention that can decrease hemostatic or thrombolytic activity could be used to inhibit or dissolve clotting. These molecules could be important in the treatment or prevention of heart attacks (infarction), strokes, or scarring.

[0673] In specific embodiments, the albumin fusion proteins of the invention and/or polynucleotides encoding albumin fusion proteins of the invention may be used to prevent, diagnose, prognose, and/or treat thrombosis, arterial thrombosis, venous thrombosis, thromboembolism, pulmonary embolism, atherosclerosis, myocardial infarction, transient ischemic attack, unstable angina. In specific embodiments, the albumin fusion proteins of the invention and/or polynucleotides encoding albumin fusion proteins of the invention may be used for the prevention of occulsion of saphenous grafts, for reducing the risk of periprocedural thrombosis as might accompany angioplasty procedures, for reducing the risk of stroke in patients with atrial fibrillation including nonrheumatic atrial fibrillation, for reducing the risk of embolism associated with mechanical heart valves and or mitral valves disease. Other uses for the albumin fusion proteins of the invention and/or polynucleotides encoding albumin fusion proteins of the invention, include, but are not limited to, the prevention of occlusions in extrcorporeal devices (e.g., intravascular canulas, vascular access shunts in hemodialysis patients, hemodialysis machines, and cardiopulmonary bypass machines).

[0674] In another embodiment, albumin fusion proteins of the invention and/or polynucleotides encoding albumin fusion proteins of the invention, may be used to prevent, diagnose, prognose, and/or treat diseases and disorders of the blood and/or blood forming organs associated with the tissue(s) in which the polypeptide of the invention is expressed.

[0675] The fusion proteins of the invention and/or polynucleotides encoding albumin fusion proteins of the invention may be used to modulate hematopoietic activity (the formation of blood cells). For example, the albumin fusion proteins of the invention and/or polynucleotides encoding albumin fusion proteins of the invention may be used to increase the quantity of all or subsets of blood cells, such as, for example, erythrocytes, lymphocytes (B or T cells), myeloid cells (e.g., basophils, eosinophils, neutrophils, mast cells, macrophages) and platelets. The ability to decrease the quantity of blood cells or subsets of blood cells may be useful in the prevention, detection, diagnosis and/or treatment of anemias and leukopenias described below. Alternatively, the albumin fusion proteins of the invention and/or polynucleotides encoding albumin fusion proteins of the invention may be used to decrease the quantity of all or subsets of blood cells, such as, for example, erythrocytes, lymphocytes (B or T cells), myeloid cells (e.g., basophils, eosinophils, neutrophils, mast cells, macrophages) and platelets. The ability to decrease the quantity of blood cells or subsets of blood cells may be useful in the prevention, detection, diagnosis and/or treatment of leukocytoses, such as, for example eosinophilia.

[0676] The fusion proteins of the invention and/or polynucleotides encoding albumin fusion proteins of the invention may be used to prevent, treat, or diagnose blood dyscrasia.

[0677] Anemias are conditions in which the number of red blood cells or amount of hemoglobin (the protein that carries oxygen) in them is below normal. Anemia may be caused by excessive bleeding, decreased red blood cell production, or increased red blood cell destruction (hemolysis). The albumin fusion proteins of the invention and/or polynucleotides encoding albumin fusion proteins of the invention may be useful in treating, preventing, and/or diagnosing anemias. Anemias that may be treated prevented or diagnosed by the albumin fusion proteins of the invention and/or polynucleotides encoding albumin fusion proteins of the invention include iron deficiency anemia, hypochromic anemia, microcytic anemia, chlorosis, hereditary siderob;astic anemia, idiopathic acquired sideroblastic anemia, red cell aplasia, megaloblastic anemia (e.g., pernicious anemia, (vitamin B12 deficiency) and folic acid deficiency anemia), aplastic anemia, hemolytic anemias (e.g., autoimmune helolytic anemia, microangiopathic hemolytic anemia, and paroxysmal nocturnal hemoglobinuria). The albumin fusion proteins of the invention and/or polynucleotides encoding albumin fusion proteins of the invention may be useful in treating, preventing, and/or diagnosing anemias associated with diseases including but not limited to, anemias associated with systemic lupus erythematosus, cancers, lymphomas, chronic renal disease, and enlarged spleens. The albumin fusion proteins of the invention and/or polynucleotides encoding albumin fusion proteins of the invention may be useful in treating, preventing, and/or diagnosing anemias arising from drug treatments such as anemias associated with methyldopa, dapsone, and/or suffadrugs. Additionally, fusion proteins of the invention and/or polynucleotides encoding albumin fusion proteins of the invention may be useful in treating, preventing, and/or diagnosing anemias associated with abnormal red blood cell architecture including but not limited to, hereditary spherocytosis, hereditary elliptocytosis, glucose-6-phosphate dehydrogenase deficiency, and sickle cell anemia.

[0678] The albumin fusion proteins of the invention and/or polynucleotides encoding albumin fusion proteins of the invention may be useful in treating, preventing, and/or diagnosing hemoglobin abnormalities, (e.g., those associated with sickle cell anemia, hemoglobin C disease, hemoglobin S-C disease, and hemoglobin E disease). Additionally, the albumin fusion proteins of the invention and/or polynucleotides encoding albumin fusion proteins of the invention may be useful in diagnosing, prognosing, preventing, and/or treating thalassemias, including, but not limited to, major and minor forms of alpha-thalassemia and beta-thalassemia.

[0679] In another embodiment, the albumin fusion proteins of the invention and/or polynucleotides encoding albumin fusion proteins of the invention may be useful in diagnosing, prognosing, preventing, and/or treating bleeding disorders including, but not limited to, thrombocytopenia (e.g., idiopathic thrombocytopenic purpura, and thrombotic thrombocytopenic purpura), Von Willebrand's disease, hereditary platelet disorders (e.g., storage pool disease such as Chediak-Higashi and Hermansky-Pudlak syndromes, thromboxane A2 dysfunction, thromboasthenia, and Bernard-Soulier syndrome), hemolytic-uremic syndrome, hemophelias such as hemophelia A or Factor VII deficiency and Christmas disease or Factor IX deficiency, Hereditary Hemorhhagic Telangiectsia, also known as Rendu-Osler-Weber syndrome, allergic purpura (Henoch Schonlein purpura) and disseminated intravascular coagulation.

[0680] The effect of the albumin fusion proteins of the invention and/or polynucleotides encoding albumin fusion proteins of the invention on the clotting time of blood may be monitored using any of the clotting tests known in the art including, but not limited to, whole blood partial thromboplastin time (PTT), the activated partial thromboplastin time (aPTF), the activated clotting time (ACT), the recalcified activated clotting time, or the Lee-White Clotting time.

[0681] Several diseases and a variety of drugs can cause platelet dysfunction. Thus, in a specific embodiment, the albumin fusion proteins of the invention and/or polynucleotides encoding albumin fusion proteins of the invention may be useful in diagnosing, prognosing, preventing, and/or treating acquired platelet dysfunction such as platelet dysfunction accompanying kidney failure, leukemia, multiple myeloma, cirrhosis of the liver, and systemic lupus erythematosus as well as platelet dysfunction associated with drug treatments, including treatment with aspirin, ticlopidine, nonsteroidal anti-inflammatory drugs (used for arthritis, pain, and sprains), and penicillin in high doses.

[0682] In another embodiment, the albumin fusion proteins of the invention and/or polynucleotides encoding albumin fusion proteins of the invention may be useful in diagnosing, prognosing, preventing, and/or treating diseases and disorders characterized by or associated with increased or decreased numbers of white blood cells. Leukopenia occurs when the number of white blood cells decreases below normal. Leukopenias include, but are not limited to, neutropenia and lymphocytopenia. An increase in the number of white blood cells compared to normal is known as leukocytosis. The body generates increased numbers of white blood cells during infection. Thus, leukocytosis may simply be a normal physiological parameter that reflects infection. Alternatively, leukocytosis may be an indicator of injury or other disease such as cancer. Leokocytoses, include but are not limited to, eosinophilia, and accumulations of macrophages. In specific embodiments, the albumin fusion proteins of the invention and/or polynucleotides encoding albumin fusion proteins of the invention may be useful in diagnosing, prognosing, preventing, and/or treating leukopenia. In other specific embodiments, the albumin fusion proteins of the invention and/or polynucleotides encoding albumin fusion proteins of the invention may be useful in diagnosing, prognosing, preventing, and/or treating leukocytosis.

[0683] Leukopenia may be a generalized decreased in all types of white blood cells, or may be a specific depletion of particular types of white blood cells. Thus, in specific embodiments, the albumin fusion proteins of the invention and/or polynucleotides encoding albumin fusion proteins of the invention may be useful in diagnosing, prognosing, preventing, and/or treating decreases in neutrophil numbers, known as neutropenia. Neutropenias that may be diagnosed, prognosed, prevented, and/or treated by the albumin fusion proteins of the invention and/or polynucleotides encoding albumin fusion proteins of the invention include, but are not limited to, infantile genetic agranulocytosis, familial neutropenia, cyclic neutropenia, neutropenias resulting from or associated with dietary deficiencies (e.g., vitamin B 12 deficiency or folic acid deficiency), neutropenias resulting from or associated with drug treatments (e.g., antibiotic regimens such as penicillin treatment, sulfonamide treatment, anticoagulant treatment, anticonvulsant drugs, anti-thyroid drugs, and cancer chemotherapy), and neutropenias resulting from increased neutrophil destruction that may occur in association with some bacterial or viral infections, allergic disorders, autoimmune diseases, conditions in which an individual has an enlarged spleen (e.g., Felty syndrome, malaria and sarcoidosis), and some drug treatment regimens.

[0684] The albumin fusion proteins of the invention and/or polynucleotides encoding albumin fusion proteins of the invention may be useful in diagnosing, prognosing, preventing, and/or treating lymphocytopenias (decreased numbers of B and/or T lymphocytes), including, but not limited to, lymphocytopenias resulting from or associated with stress, drug treatments (e.g., drug treatment with corticosteroids, cancer chemotherapies, and/or radiation therapies), AIDS infection and/or other diseases such as, for example, cancer, rheumatoid arthritis, systemic lupus erythematosus, chronic infections, some viral infections and/or hereditary disorders (e.g., DiGeorge syndrome, Wiskott-Aldrich Syndome, severe combined immunodeficiency, ataxia telangiectsia).

[0685] The albumin fusion proteins of the invention and/or polynucleotides encoding albumin fusion proteins of the invention may be useful in diagnosing, prognosing, preventing, and/or treating diseases and disorders associated with macrophage numbers and/or macrophage function including, but not limited to, Gaucher's disease, Niemann-Pick disease, Letterer-Siwe disease and Hand-Schuller-Christian disease.

[0686] In another embodiment, the albumin fusion proteins-of the invention and/or polynucleotides encoding albumin-fusion proteins of the invention may be useful in diagnosing, prognosing, preventing, and/or treating diseases and disorders associated with eosinophil numbers and/or eosinophil function including, but not limited to, idiopathic hypereosinophilic syndrome, eosinophilia-myalgia syndrome, and Hand-Schuller-Christian disease.

[0687] In yet another embodiment, the albumin fusion proteins of the invention and/or polynucleotides encoding albumin fusion proteins of the invention may be useful in diagnosing, prognosing, preventing, and/or treating leukemias and lymphomas including, but not limited to, acute lymphocytic (lymphpblastic) leukemia (ALL), acute myeloid (myelocytic, myelogenous, myeloblastic, or myelomonocytic) leukemia, chronic lymphocytic leukemia (e.g., B cell leukemias, T cell leukemias, Sezary syndrome, and Hairy cell leukenia), chronic myelocytic (myeloid, myelogenous, or granulocytic) leukemia, Hodgkin's lymphoma, non-hodgkin's lymphoma, Burkitt's lymphoma, and mycosis fungoides.

[0688] In other embodiments, the albumin fusion proteins of the invention and/or polynucleotides encoding albumin fusion proteins of the invention may be useful in diagnosing, prognosing, preventing, and/or treating diseases and disorders of plasma cells including, but not limited to, plasma cell dyscrasias, monoclonal gammaopathies, monoclonal gammopathies of undetermined significance, multiple myeloma, macroglobulinemia, Waldenstrom's macroglobulinemia, cryoglobulinemia, and Raynaud's phenomenon.

[0689] In other embodiments, the albumin fusion proteins of the invention and/or polynucleotides encoding albumin fusion proteins of the invention may be useful in treating, preventing, and/or diagnosing myeloproliferative disorders, including but not limited to, polycythemia vera, relative polycythemia, secondary polycythemia, myelofibrosis, acute myelofibrosis, agnogenic myelod metaplasia, thrombocythemia, (including both primary and seconday thrombocythemia) and chronic myelocytic leukemia.

[0690] In other embodiments, the albumin fusion proteins of the invention and/or polynucleotides encoding albumin fusion proteins of the invention may be useful as a treatment prior to surgery, to increase blood cell production.

[0691] In other embodiments, the albumin fusion proteins of the invention and/or polynucleotides encoding albumin fusion proteins of the invention may be useful as an agent to enhance the migration, phagocytosis, superoxide production, antibody dependent cellular cytotoxicity of neutrophils, eosionophils and macrophages.

[0692] In other embodiments, the albumin fusion proteins of the invention and/or polynucleotides encoding albumin fusion proteins of the invention may be useful as an agent to increase the number of stem cells in circulation prior to stem cells pheresis. In another specific embodiment, the albumin fusion proteins of the invention and/or polynucleotides encoding albumin fusion proteins of the invention may be useful as an agent to increase the number of stem cells in circulation prior to platelet pheresis.

[0693] In other embodiments, the albumin fusion proteins of the invention and/or polynucleotides encoding albumin fusion proteins of the invention may be useful as an agent to increase cytokine production.

[0694] In other embodiments, the albumin fusion proteins of the invention and/or polynucleotides encoding albumin fusion proteins of the invention may be useful in preventing, diagnosing, and/or treating primary hematopoietic disorders.

[0695] Hyperproliferative Disorders

[0696] In certain embodiments, fusion proteins of the invention and/or polynucleotides encoding albumin fusion proteins of the invention can be used to treat or detect hyperproliferative disorders, including neoplasms. Albumin fusion proteins of the invention and/or polynucleotides encoding albumin fusion proteins of the invention may inhibit the proliferation of the disorder through direct or indirect interactions. Alternatively, fusion proteins of the invention and/or polynucleotides encoding albumin fusion proteins of the invention may proliferate other cells which can inhibit the hyperproliferative disorder.

[0697] For example, by increasing an immune response, particularly increasing antigenic qualities of the hyperproliferative disorder or by proliferating, differentiating, or mobilizing T-cells, hyperproliferative disorders can be treated. This immune response may be increased by either enhancing an existing immune response, or by initiating a new immune response. Alternatively, decreasing an immune response may also be a method of treating hyperproliferative disorders, such as a chemotherapeutic agent.

[0698] Examples of hyperproliferative disorders that can be treated or detected by fusion proteins of the invention and/or polynucleotides encoding albumin fusion proteins of the invention include, but are not limited to neoplasms located in the: colon, abdomen, bone, breast, digestive system, liver, pancreas, peritoneum, endocrine glands (adrenal, parathyroid, pituitary, testicles, ovary, thymus, thyroid), eye, head and neck, nervous (central and peripheral), lymphatic system, pelvis, skin, soft tissue, spleen, thorax, and urogenital tract.

[0699] Similarly, other hyperproliferative disorders can also be treated or detected by fusion proteins of the invention and/or polynucleotides encoding albumin fusion proteins of the invention. Examples of such hyperproliferative disorders include, but are not limited to: Acute Childhood Lymphoblastic Leukemia, Acute Lymphoblastic Leukemia, Acute Lymphocytic Leukemia, Acute Myeloid Leukemia, Adrenocortical Carcinoma, Adult (Primary) Hepatocellular Cancer, Adult (Primary) Liver Cancer, Adult Acute Lymphocytic Leukemia, Adult Acute Myeloid Leukemia, Adult Hodgkin's Disease, Adult Hodgkin's Lymphoma, Adult Lymphocytic Leukemia, Adult Non-Hodgkin's Lymphoma, Adult Primary Liver Cancer, Adult Soft Tissue Sarcoma, AIDS-Related Lymphoma, AIDS-Related Malignancies, Anal Cancer, Astrocytoma, Bile Duct Cancer, Bladder Cancer, Bone Cancer, Brain Stem Glioma, Brain Tumors, Breast Cancer, Cancer of the Renal Pelvis and Ureter, Central Nervous System (Primary) Lymphoma, Central Nervous System Lymphoma, Cerebellar Astrocytoma, Cerebral Astrocytoma, Cervical Cancer, Childhood (Primary) Hepatocellular Cancer, Childhood (Primary) Liver Cancer, Childhood Acute Lymphoblastic Leukemia, Childhood Acute Myeloid Leukemia, Childhood Brain Stem Glioma, Childhood Cerebellar Astrocytoma, Childhood Cerebral Astrocytoma, Childhood Extracranial Germ Cell Tumors, Childhood Hodgkin's Disease, Childhood Hodgkin's Lymphoma, Childhood Hypothalamic and Visual Pathway Glioma, Childhood Lymphoblastic Leukemia, Childhood Medulloblastoma, Childhood Non-Hodgkin's Lymphoma, Childhood Pineal and Supratentorial Primitive Neuroectodermal Tumors, Childhood Primary Liver Cancer, Childhood Rhabdomyosarcoma, Childhood Soft Tissue Sarcoma, Childhood Visual Pathway and Hypothalamic Glioma, Chronic Lymphocytic Leukemia, Chronic Myelogenous Leukemia, Colon Cancer, Cutaneous T-Cell Lymphoma, Endocrine Pancreas Islet Cell Carcinoma, Endometrial Cancer, Ependymoma, Epithelial Cancer, Esophageal Cancer, Ewing's Sarcoma and Related Tumors, Exocrine Pancreatic Cancer, Extracranial Germ Cell Tumor, Extragonadal Germ Cell Tumor, Extrahepatic Bile Duct Cancer, Eye Cancer, Female Breast Cancer, Gaucher's Disease, Gallbladder Cancer, Gastric Cancer, Gastrointestinal Carcinoid Tumor, Gastrointestinal Tumors, Germ Cell Tumors, Gestational Trophoblastic Tumor, Hairy Cell Leukemia, Head and Neck Cancer, Hepatocellular Cancer, Hodgkin's Disease, Hodgkin's Lymphoma, Hypergammaglobulinemia, Hypopharyngeal Cancer, Intestinal Cancers, Intraocular Melanoma, Islet Cell Carcinoma, Islet Cell Pancreatic Cancer, Kaposi's Sarcoma, Kidney Cancer, Laryngeal Cancer, Lip and Oral Cavity Cancer, Liver Cancer, Lung Cancer, Lymphoproliferative Disorders, Macroglobulinemia, Male Breast Cancer, Malignant Mesothelioma, Malignant Thymoma, Medulloblastoma, Melanoma, Mesothelioma, Metastatic Occult Primary Squamous Neck Cancer, Metastatic Primary Squamous Neck Cancer, Metastatic Squamous Neck Cancer, Multiple Myeloma, Multiple Myeloma/Plasma Cell Neoplasm, Myelodysplastic Syndrome, Myelogenous Leukemia, Myeloid Leukemia, Myeloproliferative Disorders, Nasal Cavity and Paranasal Sinus Cancer, Nasopharyngeal Cancer, Neuroblastoma, Non-Hodgkin's Lymphoma During Pregnancy, Nonmelanoma Skin Cancer, Non-Small Cell Lung Cancer, Occult Primary Metastatic Squamous Neck Cancer, Oropharyngeal Cancer, Osteo-/Malignant Fibrous Sarcoma, OsteosarcomalMalignant Fibrous Histiocytoma, Osteosarcoma/Malignant Fibrous Histiocytoma of Bone, Ovarian Epithelial Cancer, Ovarian Germ Cell Tumor, Ovarian Low Malignant Potential Tumor, Pancreatic Cancer, Paraproteinemias, Purpura, Parathyroid Cancer, Penile Cancer, Pheochromocytoma, Pituitary Tumor, Plasma Cell Neoplasm/Multiple Myeloma, Primary Central Nervous System Lymphoma, Primary Liver Cancer, Prostate Cancer, Rectal Cancer, Renal Cell Cancer, Renal Pelvis and Ureter Cancer, Retinoblastoma, Rhabdomyosarcoma, Salivary Gland Cancer, Sarcoidosis Sarcomas, Sezary Syndrome, Skin Cancer, Small Cell Lung Cancer, Small Intestine Cancer, Soft Tissue Sarcoma, Squamous Neck Cancer, Stomach Cancer, Supratentorial Primitive Neuroectodermal and Pineal Tumors, T-Cell Lymphoma, Testicular Cancer, Thymoma, Thyroid Cancer, Transitional Cell Cancer of the Renal Pelvis and Ureter, Transitional Renal Pelvis and Ureter Cancer, Trophoblastic Tumors, Ureter and Renal Pelvis Cell Cancer, Urethral Cancer, Uterine Cancer, Uterine Sarcoma, Vaginal Cancer, Visual Pathway and Hypothalamic Glioma, Vulvar Cancer, Waldenstrom's Macroglobulinemia, Wilms' Tumor, and any other hyperproliferative disease, besides neoplasia, located in an organ system listed above.

[0700] In another preferred embodiment, albumin fusion proteins of the invention and/or polynucleotides encoding albumin fusion proteins of the invention are used to diagnose, prognose, prevent, and/or treat premalignant conditions and to prevent progression to a neoplastic or malignant state, including but not limited to those disorders described above. Such uses are indicated in conditions known or suspected of preceding progression to neoplasia or cancer, in particular, where non-neoplastic cell growth consisting of hyperplasia, metaplasia, or most particularly, dysplasia has occurred (for review of such abnormal growth conditions, see Robbins and Angell, 1976, Basic Pathology, 2d Ed., W. B. Saunders Co., Philadelphia, pp. 68-79.)

[0701] Hyperplasia is a form of controlled cell proliferation, involving an increase in cell number in a tissue or organ, without significant alteration in structure or function. Hyperplastic disorders which can be diagnosed, prognosed, prevented, and/or treated with fusion proteins of the invention and/or polynucleotides encoding albumin fusion proteins of the invention include, but are not limited to, angiofollicular mediastinal lymph node hyperplasia, angiolymphoid hyperplasia with eosinophilia, atypical melanocytic hyperplasia, basal cell hyperplasia, benign giant lymph node hyperplasia, cementum hyperplasia, congenital adrenal hyperplasia, congenital sebaceous hyperplasia, cystic hyperplasia, cystic hyperplasia of the breast, denture hyperplasia, ductal hyperplasia, endometrial hyperplasia, fibromuscular hyperplasia, focal epithelial hyperplasia, gingival hyperplasia, inflammatory fibrous hyperplasia, inflammatory papillary hyperplasia, intravascular papillary endothelial hyperplasia, nodular hyperplasia of prostate, nodular regenerative hyperplasia, pseudoepitheliomatous hyperplasia, senile sebaceous hyperplasia, and verrucous hyperplasia.

[0702] Metaplasia is a form of controlled cell growth in which one type of adult or fully differentiated cell substitutes for another type of adult cell. Metaplastic disorders which can be diagnosed, prognosed, prevented, and/or treated with fusion proteins of the invention and/or polynucleotides encoding albumin fusion proteins of the invention include, but are not limited to, agnogenic myeloid metaplasia, apocrine metaplasia, atypical metaplasia, autoparenchymatous metaplasia, connective tissue metaplasia, epithelial metaplasia, intestinal metaplasia, metaplastic anemia, metaplastic ossification, metaplastic polyps, myeloid metaplasia, primary myeloid metaplasia, secondary myeloid metaplasia, squamous metaplasia, squamous metaplasia of anion, and symptomatic myeloid metaplasia.

[0703] Dysplasia is frequently a forerunner of cancer, and is found mainly in the epithelia; it is the most disorderly form of non-neoplastic cell growth, involving a loss in individual cell uniformity and in the architectural orientation of cells. Dysplastic cells often have abnormally large, deeply stained nuclei, and exhibit pleomorphism. Dysplasia characteristically occurs where there exists chronic irritation or inflammation. Dysplastic disorders which can be diagnosed, prognosed, prevented, and/or treated with fusion proteins of the invention and/or polynucleotides encoding albumin fusion proteins of the invention include, but are not limited to, anhidrotic ectodermal dysplasia, anterofacial dysplasia, asphyxiating thoracic dysplasia, atriodigital dysplasia, bronchopulmonary dysplasia, cerebral dysplasia, cervical dysplasia, chondroectodermal dysplasia, cleidocranial dysplasia, congenital ectodermal dysplasia, craniodiaphysial dysplasia, craniocarpotarsal dysplasia, craniometaphysial dysplasia, dentin dysplasia, diaphysial dysplasia, ectodermal dysplasia, enamel dysplasia, encephalo-ophthalmic dysplasia, dysplasia epiphysialis hemimelia, dysplasia epiphysialis multiplex, dysplasia epiphysialis punctata, epithelial dysplasia, faciodigitogenital dysplasia, familial fibrous dysplasia of jaws, familial white folded dysplasia, fibromuscular dysplasia, fibrous dysplasia of bone, florid osseous dysplasia, hereditary renal-retinal dysplasia, hidrotic ectodermal dysplasia, hypohidrotic ectodermal dysplasia, lymphopenic thymic dysplasia, mammary dysplasia, mandibulofacial dysplasia, metaphysial dysplasia, Mondini dysplasia, monostotic fibrous dysplasia, mucoepithelial dysplasia, multiple epiphysial dysplasia, oculoauriculovertebral dysplasia, oculodentodigital dysplasia, oculovertebral dysplasia, odontogenic dysplasia, ophthalmomandibulomelic dysplasia, periapical cemental dysplasia, polyostotic fibrous dysplasia, pseudoachondroplastic spondyloepiphysial dysplasia, retinal dysplasia, septo-optic dysplasia, spondyloepiphysial dysplasia, and ventriculoradial dysplasia.

[0704] Additional pre-neoplastic disorders which can be diagnosed, prognosed, prevented, and/or treated with fusion proteins of the invention and/or polynucleotides encoding albumin fusion proteins of the invention include, but are not limited to, benign dysproliferative disorders (e.g., benign tumors, fibrocystic conditions, tissue hypertrophy, intestinal polyps, colon polyps, and esophageal dysplasia), leukoplakia, keratoses, Bowen's disease, Farmer's Skin, solar cheilitis, and solar keratosis.

[0705] In another embodiment, albumin fusion proteins of the invention and/or polynucleotides encoding albumin fusion proteins of the invention, may be used to diagnose and/or prognose disorders associated with the tissue(s) in which the polypeptide of the invention is expressed.

[0706] In another embodiment, albumin fusion proteins of the invention and/or polynucleotides encoding albumin fusion proteins of the invention conjugated to a toxin or a radioactive isotope, as described herein, may be used to treat cancers and neoplasms, including, but not limited to, those described herein. In a further preferred embodiment, albumin fusion proteins of the invention and/or polynucleotides encoding albumin fusion proteins of the invention conjugated to a toxin or a radioactive isotope, as described herein, may be used to treat acute myelogenous leukemia.

[0707] Additionally, fusion proteins of the invention and/or polynucleotides encoding albumin fusion proteins of the invention may affect apoptosis, and therefore, would be useful in treating a number of diseases associated with increased cell survival or the inhibition of apoptosis. For example, diseases associated with increased cell survival or the inhibition of apoptosis that could be diagnosed, prognosed, prevented, and/or treated by polynucleotides, polypeptides, and/or agonists or antagonists of the invention, include cancers (such as follicular lymphomas, carcinomas with p53 mutations, and hormone-dependent tumors, including, but not limited to colon cancer, cardiac tumors, pancreatic cancer, melanoma, retinoblastoma, glioblastoma, lung cancer, intestinal cancer, testicular cancer, stomach cancer, neuroblastoma, myxoma, myoma, lymphoma, endothelioma, osteoblastoma, osteoclastoma, osteosarcoma, chondrosarcoma, adenoma, breast cancer, prostate cancel, Kaposi's sarcoma and ovarian cancer); autoimmune disorders such as, multiple sclerosis, Sjogren's syndrome, Hashimoto's thyroiditis, biliary cirrhosis, Behcet's disease, Crohn's disease, polymyositis, systemic lupus erythematosus and immune-related glomerulonephritis and rheumatoid arthritis) and viral infections (such as herpes viruses, pox viruses and adenoviruses), inflammation, graft v. host disease, acute graft rejection, and chronic graft rejection.

[0708] In preferred embodiments, fusion proteins of the invention and/or polynucleotides encoding albumin fusion proteins of the invention are used to inhibit growth, progression, and/or metastasis of cancers, in particular those listed above.

[0709] Additional diseases or conditions associated with increased cell survival that could be diagnosed, prognosed, prevented, and/or treated by fusion proteins of the invention and/or polynucleotides encoding albumin fusion proteins of the invention, include, but are not limited to, progression, and/or metastases of malignancies and related disorders such as leukemia (including acute leukemias (e.g., acute lymphocytic leukemia, acute myelocytic leukemia (including myeloblastic, promyelocytic, myelomonocytic, monocytic, and erythroleukemia)) and chronic leukemias (e.g., chronic myelocytic (granulocytic) leukemia and chronic lymphocytic,leukemia)), polycythemia vera, lymphomas (e.g., Hodgkin's disease and non-Hodgkin's disease), multiple myeloma, Waldenstrom's macroglobulinemia, heavy chain disease, and solid tumors including, but not limited to, sarcomas and carcinomas such as fibrosarcoma, myxosarcoma, liposarcoma, chondrosarcoma, osteogenic sarcoma, chordoma, angiosarcoma, endotheliosarcoma, lymphangiosarcoma, lymphangioendotheliosarcoma, synovioma, mesothelioma, Ewing's tumor, leiomyosarcoma, rhabdomyosarcoma, colon carcinoma, pancreatic cancer, breast cancer, ovarian cancer, prostate cancer, squamous cell carcinoma, basal cell carcinoma, adenocarcinoma, sweat gland carcinoma, sebaceous gland carcinoma, papillary carcinoma, papillary adenocarcinomas, cystadenocarcinoma, medullary carcinoma, bronchogenic carcinoma, renal cell carcinoma, hepatoma, bile duct carcinoma, choriocarcinoma, seminoma, embryonal carcinoma, Wilm's tumor, cervical cancer, testicular tumor, lung carcinoma, small cell lung carcinoma, bladder carcinoma, epithelial carcinoma, glioma, astrocytoma, medulloblastoma, craniopharyngioma, ependymoma, pinealoma, emangioblastoma, acoustic neuroma, oligodendroglioma, menangioma, melanoma, neuroblastoma, and retinoblastoma.

[0710] Diseases associated with increased apoptosis that could be diagnosed, prognosed, prevented, and/or treated by fusion proteins of the invention and/or polynucleotides encoding albumin fusion proteins of the invention, include AIDS; neurodegenerative disorders (such as Alzheimer's disease, Parkinson's disease, amyotrophic lateral sclerosis, retinitis pigmentosa, cerebellar degeneration and brain tumor or prior associated disease); autoimmune disorders (such as, multiple sclerosis, Sjogren's syndrome, Hashimoto's thyroiditis, biliary cirrhosis, Behcet's disease, Crohn's disease, polymyositis, systemic lupus erythematosus and immune-related glomerulonephritis and rheumatoid arthritis) myelodysplastic syndromes (such as aplastic anemia), graft v. host disease, ischemic injury (such as that caused by myocardial infarction, stroke and reperfusion injury), liver injury (e.g., hepatitis related liver injury, ischemia/reperfusion injury, cholestosis (bile duct injury) and liver cancer); toxin-induced liver disease (such as that caused by alcohol), septic shock, cachexia and anorexia.

[0711] Hyperproliferative diseases and/or disorders that could be diagnosed, prognosed, prevented, and/or treated by fusion proteins of the invention and/or polynucleotides encoding albumin fusion proteins of the invention, include, but are not limited to, neoplasms located in the liver, abdomen, bone, breast, digestive system, pancreas, peritoneum, endocrine glands (adrenal, parathyroid, pituitary, testicles, ovary, thymus, thyroid), eye, head and neck, nervous system (central and peripheral), lymphatic system, pelvis, skin, soft tissue, spleen, thorax, and urogenital tract.

[0712] Similarly, other hyperproliferative disorders can also be diagnosed, prognosed, prevented, and/or treated by fusion proteins of the invention and/or polynucleotides encoding albumin fusion proteins of the invention. Examples of such hyperproliferative disorders include, but are not limited to: hypergammaglobulinemia, lymphoproliferative disorders, paraproteinemias, purpura, sarcoidosis, Sezary Syndrome, Waldenstron's macroglobulinemia, Gaucher's Disease, histiocytosis, and any other hyperproliferative disease, besides neoplasia, located in an organ system listed above.

[0713] Another preferred embodiment utilizes polynucleotides encoding albumin fusion proteins of the invention to inhibit aberrant cellular division, by gene therapy using the present invention, and/or protein fusions or fragments thereof.

[0714] Thus, the present invention provides a method for treating cell proliferative disorders by inserting into an abnormally proliferating cell a polynucleotide encoding an albumin fusion protein of the present invention, wherein said polynucleotide represses said expression.

[0715] Another embodiment of the present invention provides a method of treating cell-proliferative disorders in individuals comprising administration of one or more active gene copies of the present invention to an abnormally proliferating cell or cells. In a preferred embodiment, polynucleotides of the present invention is a DNA construct comprising a recombinant expression vector effective in expressing a DNA sequence encoding said polynucleotides. In another preferred embodiment of the present invention, the DNA construct encoding the fusion protein of the present invention is inserted into cells to be treated utilizing a retrovirus, or more preferably an adenoviral vector (See G J. Nabel, et. al., PNAS 1999 96: 324-326, which is hereby incorporated by reference). In a most preferred embodiment, the viral vector is defective and will not transform non-proliferating cells, only proliferating cells. Moreover, in a preferred embodiment, the polynucleotides of the present invention inserted into proliferating cells either alone, or in combination with or fused to other polynucleotides, can then be modulated via an external stimulus (i.e. magnetic, specific small molecule, chemical, or drug administration, etc.), which acts upon the promoter upstream of said polynucleotides to induce expression of the encoded protein product. As such the beneficial therapeutic affect of the present invention may be expressly modulated (i.e. to increase, decrease, or inhibit expression of the present invention) based upon said external stimulus.

[0716] Polynucleotides of the present invention may be useful in repressing expression of oncogenic genes or antigens. By “repressing expression of the oncogenic genes” is intended the suppression of the transcription of the gene, the degradation of the gene transcript (pre-message RNA), the inhibition of splicing, the destruction of the messenger RNA, the prevention of the post-translational modifications of the protein, the destruction of the protein, or the inhibition of the normal function of the protein.

[0717] For local administration to abnommally proliferating cells, polynucleotides of the present invention may be administered by method known to those of skill in the art including, but not limited to transfection, electroporation, microinjection of cells, or in vehicles such as liposomes, lipofectin, or as naked polynucleotides, or any other method described throughout the specification. The polynucleotide of the present invention may be delivered by known gene delivery systems such as, but not limited to, retroviral vectors (Gilboa, J. Virology 44:845 (1982); Hocke, Nature 320:275 (1986); Wilson, et al., Proc. Natl. Acad. Sci. U.S.A. 85:3014), vaccinia virus system (Chakrabarty et al., Mol. Cell Biol. 5:3403 (1985) or other efficient DNA delivery systems. (Yates et al., Nature 313:812 (1985)) known to those skilled in the art. These references are exemplary only and are hereby incorporated by reference. In order to specifically deliver or transfect cells which are abnormally proliferating and spare non-dividing cells, it is preferable to utilize a retrovirus, or adenoviral (as described in the art and elsewhere herein) delivery system known to those of skill in the art. Since host DNA replication is required for retroviral DNA to integrate and the retrovirus will be unable to self replicate due to the lack of the retrovirus genes needed for its life cycle. Utilizing such a retroviral delivery system for polynucleotides of the present invention will target said gene and constructs to abnormally proliferating cells and will spare the non-dividing normal cells.

[0718] The polynucleotides of the present invention may be delivered directly to cell proliferative disorder/disease sites in internal organs, body cavities and the like by use of imaging devices used to guide an injecting needle directly to the disease site. The polynucleotides of the present invention may also be administered to disease sites at the time of surgical intervention.

[0719] By “cell proliferative disease” is meant any human or animal disease or disorder, affecting any one or any combination of organs, cavities, or body parts, which is characterized by single or multiple local abnormal proliferations of cells, groups of cells, or tissues, whether benign or malignant.

[0720] Any amount of the polynucleotides of the present invention may be administered as long as it has a biologically inhibiting effect on the proliferation of the treated cells. Moreover, it is possible to administer more than one of the polynucleotide of the present invention simultaneously to the same site. By “biologically inhibiting” is meant partial or total growth inhibition as well as decreases in the rate of proliferation or growth of the cells. The biologically inhibitory dose may be determined by assessing the effects of the polynucleotides of the present invention on target malignant or abnormally proliferating cell growth in tissue culture, tumor growth in animals and cell cultures, or any other method known to one of ordinary skill in the art.

[0721] Moreover, fusion proteins of the invention and/or polynucleotides encoding albumin fusion proteins of the invention of the present invention are useful in inhibiting the angiogenesis of proliferative cells or tissues, either alone, as a protein fusion, or in combination with other polypeptides directly or indirectly, as described elsewhere herein. In a most preferred embodiment, said anti-angiogenesis effect may be achieved indirectly, for example, through the inhibition of hematopoietic, tumor-specific cells, such as tumor-associated macrophages (See Joseph I B, et al. J Natl Cancer Inst, 90(21): 1648-53 (1998), which is hereby incorporated by reference).

[0722] Albumin fusion proteins of the invention and/or polynucleotides encoding albumin fusion proteins of the invention may be useful in inhibiting proliferative cells or tissues through the induction of apoptosis. These fusion protieins and/or polynucleotides may act either directly, or indirectly to induce apoptosis of proliferative cells and tissues, for example in the activation of a death-domain receptor, such as tumor necrosis factor (TNF) receptor-1, CD95 (Fas/APO-1), TNF-receptor-related apoptosis-mediated protein (TRAMP) and TNF-related apoptosis-inducing ligand (TRAIL) receptor-1 and -2 (See Schulze-Osthoff K, et.al., Eur J Biochem 254(3):439-59 (1998), which is hereby incorporated by reference). Moreover, in another preferred embodiment of the present invention, these fusion proteins and/or polynucleotides may induce apoptosis through other mechanisms, such as in the activation of other proteins which will activate apoptosis, or through stimulating the expression of these proteins, either alone or in combination with small molecule drugs or adjuviants, such as apoptonin, galectins, thioredoxins, anti-inflammatory proteins (See for example, Mutat Res 400(1-2):447-55 (1998), Med Hypotheses. 50(5):423-33 (1998), Chem Biol Interact. April 24;111-112:23-34 (1998), J Mol Med.76(6):402-12 (1998), Int J Tissue React; 20(1):3-15 (1998), which are all hereby incorporated by reference).

[0723] Albumin fusion proteins of the invention and/or polynucleotides encoding albumin fusion proteins of the invention are useful in inhibiting the metastasis of proliferative cells or tissues. Inhibition may occur as a direct result of administering these albumin fusion proteins and/or polynucleotides, or indirectly, such as activating the expression of proteins known to inhibit metastasis, for example alpha 4 integrins, (See, e.g., Curr Top Microbiol Immunol 1998;231:125-41, which is hereby incorporated by reference). Such thereapeutic affects of the present invention may be achieved either alone, or in combination with small molecule drugs or adjuvants.

[0724] In another embodiment, the invention provides a method of delivering compositions containing the albumin fusion proteins of the invention and/or polynucleotides encoding albumin fusion proteins of the invention to targeted cells expressing the a polypeptide bound by, that binds to, or associates with an albumin fuison protein of the invention. Albumin fusion proteins of the invention may be associated with with heterologous polypeptides, heterologous nucleic acids, toxins, or prodrugs via hydrophobic, hydrophilic, ionic and/or covalent interactions.

[0725] Albumin fusion proteins of the invention are useful in enhancing the immunogenicity and/or antigenicity of proliferating cells or tissues, either directly, such as would occur if the albumin fusion proteins of the invention ‘vaccinated’ the immune response to respond to proliferative antigens and immunogens, or indirectly, such as in activating the expression of proteins known to enhance the immune response (e.g. chemokines), to said antigens and immunogens.

[0726] Renal Disorders

[0727] Albumin fusion proteins of the invention and/or polynucleotides encoding albumin fusion proteins of the invention, may be used to treat, prevent, diagnose, and/or prognose disorders of the renal system. Renal disorders which can be diagnosed, prognosed, prevented, and/or treated with compositions of the invention include, but are not limited to, kidney failure, nephritis, blood vessel disorders of kidney, metabolic and congenital kidney disorders, urinary disorders of the kidney, autoimmune disorders, sclerosis and necrosis, electrolyte imbalance, and kidney cancers.

[0728] Kidney diseases which can be diagnosed, prognosed, prevented, and/or treated with compositions of the invention include, but are not limited to, acute kidney failure, chronic kidney failure, atheroembolic renal failure, end-stage renal disease, inflammatory diseases of the kidney (e.g., acute glomerulonephritis, postinfectious glomerulonephritis, rapidly progressive glomerulonephritis, nephrotic syndrome, membranous glomerulonephritis, familial nephrotic syndrome, membranoproliferative glomerulonephritis I and II, mesangial proliferative glomerulonephritis, chronic glomerulonephritis, acute tubulointerstitial nephritis, chronic tubulointerstitial nephritis, acute post-streptococcal glomerulonephritis (PSGN), pyelonephritis, lupus nephritis, chronic nephritis, interstitial nephritis, and post-streptococcal glomerulonephritis), blood vessel disorders of the kidneys (e.g., kidney infarction, atheroembolic kidney disease, cortical necrosis, malignant nephrosclerosis, renal vein thrombosis, renal underperfusion, renal retinopathy, renal ischemia-reperfusion, renal artery embolism, and renal artery stenosis), and kidney disorders resulting form urinary tract disease (e.g., pyelonephritis, hydronephrosis, urolithiasis (renal lithiasis, nephrouithiasis), reflux nephropathy, urinary tract infections, urinary retention, and acute or chronic unilateral obstructive uropathy.)

[0729] In addition, compositions of the invention can be used to diagnose, prognose, prevent, and/or treat metabolic and congenital disorders of the kidney (e.g., uremia, renal amyloidosis, renal osteodystrophy, renal tubular acidosis, renal glycosuria, nephrogenic diabetes insipidus, cystinuria, Fanconi's syndrome, renal fibrocystic osteosis (renal rickets), Hartnup disease, Bartter's syndrome, Liddle's syndrome, polycystic kidney disease, medullary cystic disease, medullary sponge kidney, Alport's syndrome, nail-patella syndrome, congenital nephrotic syndrome, CRUSH syndrome, horseshoe kidney, diabetic nephropathy, nephrogenic diabetes insipidus, analgesic nephropathy, kidney stones, and membranous nephropathy), and autoimmune disorders of the kidney (e.g., systemic lupus erythematosus (SLE), Goodpasture syndrome, IgA nephropathy, and IgM mesangial proliferative glomerulonephritis).

[0730] Compositions of the invention can also be used to diagnose, prognose, prevent, and/or treat sclerotic or necrotic disorders of the kidney (e.g., glomerulosclerosis, diabetic nephropathy, focal segmental glomerulosclerosis (FSGS), necrotizing glomerulonephritis, and renal papillary necrosis), cancers of the kidney (e.g., nephroma, hypemephroma, nephroblastoma, renal cell cancer, transitional cell cancer, renal adenocarcinoma, squamous cell cancer, and Wilm's tumor), and electrolyte imbalances (e.g., nephrocalcinosis, pyuria, edema, hydronephritis, proteinuria, hyponatremia, hypematremia, hypokalemia, hyperkalemia, hypocalcemia, hypercalcemia, hypophosphatemia, and hyperphosphatemia).

[0731] Compositions of the invention may be administered using any method known in the art, including, but not limited to, direct needle injection at the delivery site, intravenous injection, topical administration, catheter infusion, biolistic injectors, particle accelerators, gelfoam sponge depots, other commercially available depot materials, osmotic pumps, oral or suppositorial solid pharmaceutical formulations, decanting or topical applications during surgery, aerosol delivery. Such methods are known in the art. Compositions of the invention may be administered as part of a Therapeutic, described in more detail below. Methods of delivering polynucleotides of the invention are described in more detail herein.

[0732] Cardiovascular Disorders

[0733] Albumin fusion proteins of the invention and/or polynucleotides encoding albumin fusion proteins of the invention, may be used to treat, prevent, diagnose, and/or prognose cardiovascular disorders, including, but not limited to, peripheral artery disease, such as limb ischemia.

[0734] Cardiovascular disorders include, but are not limited to, cardiovascular abnormalities, such as arterio-arterial fistula, arteriovenous fistula, cerebral arteriovenous malformations, congenital heart defects, pulmonary atresia, and Scimitar Syndrome. Congenital heart defects include, but are not limited to, aortic coarctation, cor triatriatum, coronary vessel anomalies, crisscross heart, dextrocardia, patent ductus arteriosus, Ebstein's anomaly, Eisenmenger complex, hypoplastic left heart syndrome, levocardia, tetralogy of fallot, transposition of great vessels, double outlet right ventricle, tricuspid atresia, persistent truncus arteriosus, and heart septal defects, such as aortopulmonary septal defect, endocardial cushion defects, Lutembacher's Syndrome, trilogy of Fallot, ventricular heart septal defects.

[0735] Cardiovascular disorders also include, but are not limited to, heart disease, such as arrhythmias, carcinoid heart disease, high cardiac output, low cardiac output, cardiac tamponade, endocarditis (including bacterial), heart aneurysm, cardiac arrest, congestive heart failure, congestive cardiomyopathy, paroxysmal dyspnea, cardiac edema, heart hypertrophy, congestive cardiomyopathy, left ventricular hypertrophy, right ventricular hypertrophy, post-infarction heart rupture, ventricular septal rupture, heart valve diseases, myocardial diseases, myocardial ischemia, pericardial effusion, pericarditis (including constrictive and tuberculous), pneumopericardium, postpericardiotomy syndrome, pulmonary heart disease, rheumatic heart disease, ventricular dysfunction, hyperemia, cardiovascular pregnancy complications, Scimitar Syndrome, cardiovascular syphilis, and cardiovascular tuberculosis.

[0736] Arrhythmias include, but are not limited to, sinus arrhythmia, atrial fibrillation, atrial flutter, bradycardia, extrasystole, Adams-Stokes Syndrome, bundle-branch block, sinoatrial block, long QT syndrome, parasystole, Lown-Ganong-Levine Syndrome, Mahaim-type pre-excitation syndrome, Wolff-Parkinson-White syndrome, sick sinus syndrome, tachycardias, and ventricular fibrillation. Tachycardias include paroxysmal tachycardia, supraventricular tachycardia, accelerated idioventricular rhythm, atrioventricular nodal reentry tachycardia, ectopic atrial tachycardia, ectopic junctional tachycardia, sinoatrial nodal reentry tachycardia, sinus tachycardia, Torsades de Pointes, and ventricular tachycardia.

[0737] Heart valve diseases include, but are not limited to, aortic valve insufficiency, aortic valve stenosis, hear murmurs, aortic valve prolapse, mitral valve prolapse, tricuspid valve prolapse, mitral valve insufficiency, mitral valve stenosis, pulmonary atresia, pulmonary valve insufficiency, pulmonary valve stenosis, tricuspid atresia, tricuspid valve insufficiency, and tricuspid valve stenosis.

[0738] Myocardial diseases include, but are not limited to, alcoholic cardiomyopathy, congestive cardiomyopathy, hypertrophic cardiomyopathy, aortic subvalvular stenosis, pulmonary subvalvular stenosis, restrictive cardiomyopathy, Chagas cardiomyopathy, endocardial fibroelastosis, endomyocardial fibrosis, Kearns Syndrome, myocardial reperfusion injury, and myocarditis.

[0739] Myocardial ischemias include, but are not limited to, coronary disease, such as angina pectoris, coronary aneurysm, coronary arteriosclerosis, coronary thrombosis, coronary vasospasm, myocardial infarction and myocardial stunning.

[0740] Cardiovascular diseases also include vascular diseases such as aneurysms, angiodysplasia, angiomatosis, bacillary angiomatosis, Hippel-Lindau Disease, Klippel-Trenaunay-Weber Syndrome, Sturge-Weber Syndrome, angioneurotic edema, aortic diseases, Takayasu's Arteritis, aortitis, Leriche's Syndrome, arterial occlusive diseases, arteritis, enarteritis, polyarteritis nodosa, cerebrovascular disorders, diabetic angiopathies, diabetic retinopathy, embolisms, thrombosis, erythromelalgia, hemorrhoids, hepatic veno-occlusive disease, hypertension, hypotension, ischemia, peripheral vascular diseases, phlebitis, pulmonary veno-occlusive disease, Raynaud's disease, CREST syndrome, retinal vein occlusion, Scimitar syndrome, superior vena cava syndrome, telangiectasia, atacia telangiectasia, hereditary hemorrhagic telangiectasia, varicocele, varicose veins, varicose ulcer, vasculitis, and venous insufficiency.

[0741] Aneurysms include, but are not limited to, dissecting aneurysms, false aneurysms, infected aneurysms, ruptured aneurysms, aortic aneurysms, cerebral aneurysms, coronary aneurysms, heart aneurysms, and iliac aneurysms.

[0742] Arterial occlusive diseases include, but are not limited to, arteriosclerosis, intermittent claudication, carotid stenosis, fibromuscular dysplasias, mesenteric vascular occlusion, Moyamoya disease, renal artery obstruction, retinal artery occlusion, and thromboangiitis obliterans.

[0743] Cerebrovascular disorders include, but are not limited to, carotid artery diseases, cerebral amyloid angiopathy, cerebral angeurysm, cerebral anoxia, cerebral arteriosclerosis, cerebral arteriovenous malformation, cerebral artery diseases, cerebral embolism and thrombosis, carotid artery thrombosis, sinus thrombosis, Wallenberg's syndrome, cerebral hemorrhage, epidural hematoma, subdural hematoma, subaraxhnoid hemorrhage, cerebral infarction, cerebral ischemia (including transient), subclavian steal syndrome, periventricular leukomalacia, vascular headache, cluster headache, migraine, and vertebrobasilar insufficiency.

[0744] Embolisms include, but are not limited to, air embolisms, amniotic fluid embolisms, cholesterol embolisms, blue toe syndrome, fat embolisms, pulmonary embolisms, and thromoboembolisms. Thrombosis include, but are not limited to, coronary thrombosis, hepatic vein thrombosis, retinal vein occlusion, carotid artery thrombosis, sinus thrombosis, Wallenberg's syndrome, and thrombophlebitis.

[0745] Ischemic disorders include, but are not limited to, cerebral ischemia, ischemic colitis, compartment syndromes, anterior compartment syndrome, myocardial ischemia, reperfusion injuries, and peripheral limb ischemia. Vasculitis includes, but is not limited to, aortitis, arteritis, Behcet's Syndrome, Churg-Strauss Syndrome, mucocutaneous lymph node syndrome, thromboangiitis obliterans, hypersensitivity vasculitis, Schoenlein-Henoch purpura, allergic cutaneous vasculitis, and Wegener's granulomatosis.

[0746] Albumin fusion proteins of the invention and/or polynucleotides encoding albumin fusion proteins of the invention may be administered using any method known in the art, including, but not limited to, direct needle injection at the delivery site, intravenous injection, topical administration, catheter infusion, biolistic injectors, particle accelerators, gelfoam sponge depots, other commercially available depot materials, osmotic pumps, oral or suppositorial solid pharmaceutical formulations, decanting or topical applications during surgery, aerosol delivery. Such methods are known in the art. Methods of delivering polynucleotides are described in more detail herein.

[0747] Respiratory Disorders

[0748] Albumin fusion proteins of the invention and/or polynucleotides encoding albumin fusion proteins of the invention may be used to treat, prevent, diagnose, and/or prognose diseases and/or disorders of the respiratory system.

[0749] Diseases and disorders of the respiratory system include, but are not limited to, nasal vestibulitis, nonallergic rhinitis (e.g., acute rhinitis, chronic rhinitis, atrophic rhinitis, vasomotor rhinitis), nasal polyps, and sinusitis, juvenile angiofibromas, cancer of the nose and juvenile papillomas, vocal cord polyps, nodules (singer's nodules), contact ulcers, vocal cord paralysis, laryngoceles, pharyngitis (e.g., viral and bacterial), tonsillitis, tonsillar cellulitis, parapharyngeal abscess, laryngitis, laryngoceles, and throat cancers (e.g., cancer of the nasopharynx, tonsil cancer, larynx cancer), lung cancer (e.g., squamous cell carcinoma, small cell (oat cell) carcinoma, large cell carcinoma, and adenocarcinoma), allergic disorders (eosinophilic pneumonia, hypersensitivity pneumonitis (e.g., extrinsic allergic alveolitis, allergic interstitial pneumonitis, organic dust pneumoconiosis, allergic bronchopulmonary aspergillosis, asthma, Wegener's granulomatosis (granulomatous vasculitis), Goodpasture's syndrome)), pneumonia (e.g., bacterial pneumonia (e.g., Streptococcus pneumoniae (pneumoncoccal pneumonia), Staphylococcus aureus (staphylococcal pneumonia), Gram-negative bacterial pneumonia (caused by, e.g., Klebsiella and Pseudomas spp.), Mycoplasma pneumoniae pneumonia, Hemophilus influenzae pneumonia, Legionella pneumophila (Legionnaires' disease), and Chlamydia psittaci (Psittacosis)), and viral pneumonia (e.g., influenza, chickenpox (varicella).

[0750] Additional diseases and disorders of the respiratory system include, but are not limited to bronchiolitis, polio (poliomyelitis), croup, respiratory syncytial viral infection, mumps, erythema infectiosum (fifth disease), roseola infantum, progressive rubella panencephalitis, german measles, and subacute sclerosing panencephalitis), fungal pneumonia (e.g., Histoplasmosis, Coccidioidomycosis, Blastomycosis, fungal infections in people with severely suppressed immune systems (e.g., cryptococcosis, caused by Cryptococcus neoformans; aspergillosis, caused by Aspergillus spp.; candidiasis, caused by Candida; and mucormycosis)), Pneumocystis carinii (pneumocystis pneumonia), atypical pneumonias (e.g., Mycoplasma and Chlamydia spp.), opportunistic infection pneumonia, nosocomial pneumonia, chemical pneumonitis, and aspiration pneumonia, pleural disorders (e.g., pleurisy, pleural effusion, and pneumothorax (e.g., simple spontaneous pneumothorax, complicated spontaneous pneumothorax, tension pneumothorax)), obstructive airway diseases (e.g., asthma, chronic obstructive pulmonary disease (COPD), emphysema, chronic or acute bronchitis), occupational lung diseases (e.g., silicosis, black lung (coal workers' pneumoconiosis), asbestosis, berylliosis, occupational asthsma, byssinosis, and benign pneumoconioses), Infiltrative Lung Disease (e.g., pulmonary fibrosis (e.g., fibrosing alveolitis, usual interstitial pneumonia), idiopathic pulmonary fibrosis, desquamative interstitial pneumonia, lymphoid interstitial pneumonia, histiocytosis X (e.g., Letterer-Siwe disease, Hand-Schuller-Christian disease, eosinophilic granuloma), idiopathic pulmonary hemosiderosis, sarcoidosis and pulmonary alveolar proteinosis), Acute respiratory distress syndrome (also called, e.g., adult respiratory distress syndrome), edema, pulmonary embolism, bronchitis (e.g., viral, bacterial), bronchiectasis, atelectasis, lung abscess (caused by, e.g., Staphylococcus aureus or Legionella pneumophila), and cystic fibrosis.

[0751] Anti-Angiogenesis Activity

[0752] The naturally occurring balance between endogenous stimulators and inhibitors of angiogenesis is one in which inhibitory influences predominate. Rastinejad et al., Cell 56:345-355 (1989). In those rare instances in which neovascularization occurs under normal physiological conditions, such as wound healing, organ regeneration, embryonic development, and female reproductive processes, angiogenesis is stringently regulated and spatially and temporally delimited. Under conditions of pathological angiogenesis such as that characterizing solid tumor growth, these regulatory controls fail. Unregulated angiogenesis becomes pathologic and sustains progression of many neoplastic and non-neoplastic diseases. A number of serious diseases are dominated by abnormal neovascularization including solid tumor growth and metastases, arthritis, some types of eye disorders, and psoriasis. See, e.g., reviews by Moses et al., Biotech. 9:630-634 (1991); Folkman et al., N. Engl. J. Med., 333:1757-1763 (1995); Auerbach et al., J. Microvasc. Res. 29:401-411 (1985); Folkman, Advances in Cancer Research, eds. Klein and Weinhouse, Academic Press, New York, pp. 175-203 (1985); Patz, Am. J. Opthalmol. 94:715-743 (1982); and Folkman et al., Science 221:719-725 (1983). In a number of pathological conditions, the process of angiogenesis contributes to the disease state. For example, significant data have accumulated which suggest that the growth of solid tumors is dependent on angiogenesis. Folkman and Klagsbrun, Science 235:442-447 (1987).

[0753] The present invention provides for treatment of diseases or disorders associated with neovascularization by administration of fusion proteins of the invention and/or polynucleotides encoding albumin fusion proteins of the invention. Malignant and metastatic conditions which can be treated with the polynucleotides and polypeptides, or agonists or antagonists of the invention include, but are not limited to, malignancies, solid tumors, and cancers described herein and otherwise known in the art (for a review of such disorders, see Fishman et al., Medicine, 2d Ed., J. B. Uppincott Co., Philadelphia (1985)). Thus, the present invention provides a method of treating an angiogenesis-related disease and/or disorder, comprising administering to an individual in need thereof a therapeutically effective amount of an albumin fusion protein of the invention and/or polynucleotides encoding an albumin fusion protein of the invention. For example, fusion proteins of the invention and/or polynucleotides encoding albumin fusion proteins of the invention may be utilized in a variety of additional methods in order to therapeutically treat a cancer or tumor. Cancers which may be treated with fusion proteins of the invention and/or polynucleotides encoding albumin fusion proteins of the invention include, but are not limited to solid tumors, including prostate, lung, breast, ovarian, stomach, pancreas, larynx, esophagus, testes, liver, parotid, biliary tract, colon, rectum, cervix, uterus, endometrium, kidney, bladder, thyroid cancer; primary tumors and metastases; melanomas; glioblastoma; Kaposi's sarcoma; leiomyosarcoma; non-small cell lung cancer; colorectal cancer; advanced malignancies; and blood born tumors such as leukemias. For example, fusion proteins of the invention and/or polynucleotides encoding albumin fusion proteins of the invention may be delivered topically, in order to treat cancers such as skin cancer, head and neck tumors, breast tumors, and Kaposi's sarcoma.

[0754] Within yet other aspects, fusion proteins of the invention and/or polynucleotides encoding albumin fusion proteins of the invention may be utilized to treat superficial forms of bladder cancer by, for example, intravesical administration. Albumin fusion proteins of the invention and/or polynucleotides encoding albumin fusion proteins of the invention may be delivered directly into the tumor, or near the tumor site, via injection or a catheter. Of course,. as the artisan of ordinary skill will appreciate, the appropriate mode of administration will vary according to the cancer to be treated. Other modes of delivery are discussed herein.

[0755] Albumin fusion proteins of the invention and/or polynucleotides encoding albumin fusion proteins of the invention may be useful in treating other disorders, besides cancers, which involve angiogenesis. These disorders include, but are not limited to: benign tumors, for example hemangiomas, acoustic neuromas, neurofibromas, trachomas, and pyogenic granulomas; artheroscleric plaques; ocular angiogenic diseases, for example, diabetic retinopathy, retinopathy of prematurity, macular degeneration, corneal graft rejection, neovascular glaucoma, retrolental fibroplasia, rubeosis, retinoblastoma, uvietis and Pterygia (abnormal blood vessel growth) of the eye; rheumatoid arthritis; psoriasis; delayed wound healing; endometriosis; vasculogenesis; granulations; hypertrophic scars (keloids); nonunion fractures; scleroderma; trachoma; vascular adhesions; myocardial angiogenesis; coronary collaterals; cerebral collaterals; arteriovenous malformations; ischemic limb angiogenesis; Osler-Webber Syndrome; plaque neovascularization; telangiectasia; hemophiliac joints; angiofibroma; fibromuscular dysplasia; wound granulation; Crohn's disease; and atherosclerosis.

[0756] For example, within one aspect of the present invention methods are provided for treating hypertrophic scars and keloids, comprising the step of administering albumin fusion proteins of the invention and/or polynucleotides encoding albumin fusion proteins of the invention to a hypertrophic scar or keloid.

[0757] Within one embodiment of the present invention fusion proteins of the invention and/or polynucleotides encoding albumin fusion proteins of the invention are directly injected into a hypertrophic scar or keloid, in order to prevent the progression of these lesions. This therapy is of particular value in the prophylactic treatment of conditions which are known to result in the development of hypertrophic scars and keloids (e.g., burns), and is preferably initiated after the proliferative phase has had time to progress (approximately 14 days after the initial injury), but before hypertrophic scar or keloid development. As noted above, the present invention also provides methods for treating neovascular diseases of the eye, including for example, corneal neovascularization, neovascular glaucoma, proliferative diabetic retinopathy, retrolental fibroplasia and macular degeneration.

[0758] Moreover, Ocular disorders associated with neovascularization which can be treated with the albumin fusion proteins of the invention and/or polynucleotides encoding albumin fusion proteins of the invention include, but are not limited to: neovascular glaucoma, diabetic retinopathy, retinoblastoma, retrolental fibroplasia, uveitis, retinopathy of prematurity macular degeneration, corneal graft neovascularization, as well as other eye inflammatory diseases, ocular tumors and diseases associated with choroidal or iris neovascularization. See, e.g., reviews by Waltman et al., Am. J. Ophthal. 85:704-710 (1978) and Gartner et al., Surv. Ophthal. 22:291-312 (1978).

[0759] Thus, within one aspect of the present invention methods are provided for treating neovascular diseases of the eye such as corneal neovascularization (including corneal graft neovascularization), comprising the step of administering to a patient a therapeutically effective amount of a compound (e.g., fusion proteins of the invention and/or polynucleotides encoding albumin fusion proteins of the invention) to the cornea, such that the formation of blood vessels is inhibited. Briefly, the cornea is a tissue which normally lacks blood vessels. In certain pathological conditions however, capillaries may extend into the cornea from the pericorneal vascular plexus of the limbus. When the cornea becomes vascularized, it also becomes clouded, resulting in a decline in the patient's visual acuity. Visual loss may become complete if the cornea completely opacitates. A wide variety of disorders can result in corneal neovascularization, including for example, corneal infections (e.g., trachoma, herpes simplex keratitis, leishmaniasis and onchocerciasis), immunological processes (e.g., graft rejection and Stevens-Johnson's syndrome), alkali burns, trauma, inflammation (of any cause), toxic and nutritional deficiency states, and as a complication of wearing contact lenses.

[0760] Within particularly preferred embodiments of the invention, may be prepared for topical administration in saline (combined with any of the preservatives and antimicrobial agents commonly used in ocular preparations), and administered in eyedrop form. The solution or suspension may be prepared in its pure form and administered several times daily. Alternatively, anti-angiogenic compositions, prepared as described above, may also be administered directly to the cornea. Within preferred embodiments, the anti-angiogenic composition is prepared with a muco-adhesive polymer which binds to cornea. Within further embodiments, the anti-angiogenic factors or anti-angiogenic compositions may be utilized as an adjunct to conventional steroid therapy. Topical therapy may also be useful prophylactically in corneal lesions which are known to have a high probability of inducing an angiogenic response (such as chemical burns). In these instances the treatment, likely in combination with steroids, may be instituted immediately to help prevent subsequent complications.

[0761] Within other embodiments, the compounds described above may be injected directly into the corneal stroma by an ophthalmologist under microscopic guidance. The preferred site of injection may vary with the morphology of the individual lesion, but the goal of the administration would be to place the composition at the advancing front of the vasculature (i.e., interspersed between the blood vessels and the normal cornea). In most cases this would involve perilimbic corneal injection to “protect” the cornea from the advancing blood vessels. This method may also be utilized shortly after a corneal insult in order to prophylactically prevent corneal neovasculatixation. In this situation the material could be injected in the perilimbic cornea interspersed between the corneal lesion and its undesired potential limbic blood supply. Such methods may also be utilized in a similar fashion to prevent capillary invasion of transplanted corneas. In a sustained-release form injections might only be required 2-3 times per year. A steroid could also be added to the injection solution to reduce inflammation resulting from the injection itself.

[0762] Within another aspect of the present invention, methods are provided for treating neovascular glaucoma, comprising the step of administering to a patient a therapeutically effective amount of an albumin fusion protein of the invention and/or polynucleotides encoding an albumin fusion protein of the invention to the eye, such that the formation of blood vessels is inhibited. In one embodiment, the compound may be administered topically to the eye in order to treat early forms of neovascular glaucoma. Within other embodiments, the compound may be implanted by injection into the region of the anterior chamber angle. Within other embodiments, the compound may also be placed in any location such that the compound is continuously released into the aqueous humor. Within another aspect of the present invention, methods are provided for treating proliferative diabetic retinopathy, comprising the step of administering to a patient a therapeutically effective amount of an albumin fusion protein of the invention and/or polynucleotides encoding an albumin fusion protein of the invention to the eyes, such that the formation of blood vessels is inhibited.

[0763] Within particularly preferred embodiments of the invention, proliferative diabetic retinopathy may be treated by injection into the aqueous humor or the vitreous, in order to increase the local concentration of the polynucleotide, polypeptide, antagonist and/or agonist in the retina. Preferably, this treatment should be initiated prior to the acquisition of severe disease requiring photocoagulation.

[0764] Within another aspect of the present invention, methods are provided for treating retrolental fibroplasia, comprising the step of administering to a patient a therapeutically effective amount of an albumin fusion protein of the invention and/or polynucleotides encoding an albumin fusion protein of the invention to the eye, such that the formation of blood vessels is inhibited. The compound may be administered topically, via intravitreous injection and/or via intraocular implants.

[0765] Additionally, disorders which can be treated with fusion proteins of the invention and/or polynucleotides encoding albumin fusion proteins of the invention include, but are not limited to, hemangioma, arthritis, psoriasis, angiofibroma, atherosclerotic plaques, delayed wound healing, granulations, hemophilic joints, hypertrophic scars, nonunion fractures, Osler-Weber syndrome, pyogenic granuloma, scleroderma, trachoma, and vascular adhesions.

[0766] Moreover, disorders and/or states, which can be treated, prevented, diagnosed, and/or prognosed with the the albumin fusion proteins of the invention and/or polynucleotides encoding albumin fusion proteins of the invention of the invention include, but are not limited to, solid tumors, blood born tumors such as leukemias, tumor metastasis, Kaposi's sarcoma, benign tumors, for example hemangiomas, acoustic neuromas, neurofibromas, trachomas, and pyogenic granulomas, rheumatoid arthritis, psoriasis, ocular angiogenic diseases, for example, diabetic retinopathy, retinopathy of prematurity, macular degeneration, corneal graft rejection, neovascular glaucoma, retrolental fibroplasia, rubeosis, retinoblastoma, and uvietis, delayed wound healing, endometriosis, vascluogenesis, granulations, hypertrophic scars (keloids), nonunion fractures, scleroderma, trachoma, vascular adhesions, myocardial angiogenesis, coronary collaterals, cerebral collaterals, arteriovenous malformations, ischemic limb angiogenesis, Osler-Webber Syndrome, plaque neovascularization, telangiectasia, hemophiliac joints, angiofibroma fibromuscular dysplasia, wound granulation, Crohn's disease, atherosclerosis, birth control agent by preventing vascularization required for embryo implantation controlling menstruation, diseases that have angiogenesis as a pathologic consequence such as cat scratch disease (Rochele minalia quintosa), ulcers (Helicobacter pylori), Bartonellosis and bacillary angiomatosis.

[0767] In one aspect of the birth control method, an amount of the compound sufficient to block embryo implantation is administered before or after intercourse and fertilization have occurred, thus providing an effective method of birth control, possibly a “morning after” method. Albumin fusion proteins of the invention and/or polynucleotides encoding albumin fusion-proteins of the invention may also be used in controlling menstruation or administered as either a peritoneal lavage fluid or for peritoneal implantation in the treatment of endometriosis.

[0768] Albumin fusion proteins of the invention and/or polynucleotides encoding albumin fusion proteins of the invention may be incorporated into surgical sutures in order to prevent stitch granulomas.

[0769] Albumin fusion proteins of the invention and/or polynucleotides encoding albumin fusion proteins of the invention may be utilized in a wide variety of surgical procedures. For example, within one aspect of the present invention a compositions (in the form of, for example, a spray or film) may be utilized to coat or spray an area prior to removal of a tumor, in order to isolate normal surrounding tissues from malignant tissue, and/or to prevent the spread of disease to surrounding tissues. Within other aspects of the present invention, compositions (e.g., in the form of a spray) may be delivered via endoscopic procedures in order to coat tumors, or inhibit angiogenesis in a desired locale. Within yet other aspects of the present invention, surgical meshes which have been coated with anti- angiogenic compositions of the present invention may be utilized in any procedure wherein a surgical mesh might be utilized. For example, within one embodiment of the invention a surgical mesh laden with an-anti-angiogenic composition may be utilized during abdominal cancer resection surgery (e.g., subsequent to colon resection) in order to provide support to the structure, and to release an amount of the anti-angiogenic factor.

[0770] Within further aspects of the present invention, methods are provided for treating tumor excision sites, comprising administering albumin fusion proteins of the invention and/or polynucleotides encoding albumin fusion proteins of the invention to the resection margins of a tumor subsequent to excision, such that the local recurrence of cancer and the formation of new blood vessels at the site is inhibited. Within one embodiment of the invention, the anti-angiogenic compound is administered directly to the tumor excision site (e.g., applied by swabbing, brushing or otherwise coating the resection margins of the tumor with the anti-angiogenic compound). Alternatively, the anti-angiogenic compounds may be incorporated into known surgical pastes prior to administration. Within particularly preferred embodiments of the invention, the anti-angiogenic compounds are applied after hepatic resections for malignancy, and after neurosurgical operations.

[0771] Within one aspect of the present invention, fusion proteins of the invention and/or polynucleotides encoding albumin fusion proteins of the invention may be administered to the resection margin of a wide variety of tumors, including for example, breast, colon, brain and hepatic tumors. For example, within one embodiment of the invention, anti-angiogenic compounds may be administered to the site of a neurological tumor subsequent to excision, such that the formation of new blood vessels at the site are inhibited.

[0772] The albumin fusion proteins of the invention and/or polynucleotides encoding albumin fusion proteins of the invention may also be administered along with other anti-angiogenic factors. Representative examples of other anti-angiogenic factors include: Anti-Invasive Factor, retinoic acid and derivatives thereof, paclitaxel, Suramin, Tissue Inhibitor of Metalloproteinase-1, Tissue Inhibitor of Metalloproteinase-2, Plasminogen Activator Inhibitor-1, Plasminogen Activator Inhibitor-2, and various forms of the lighter “d group” transition metals.

[0773] Lighter “d group” transition metals include, for example, vanadium, molybdenum, tungsten, titanium, niobium, and tantalum species. Such transition metal species may form transition metal complexes. Suitable complexes of the above-mentioned transition metal species include oxo transition metal complexes.

[0774] Representative examples of vanadium complexes include oxo vanadium complexes such as vanadate and vanadyl complexes. Suitable vanadate complexes include metavanadate and orthovanadate complexes such as, for example, ammonium metavanadate, sodium metavanadate, and sodium orthovanadate. Suitable vanadyl complexes include, for example, vanadyl acetylacetonate and vanadyl sulfate including vanadyl sulfate hydrates such as vanadyl sulfate mono- and trihydrates.

[0775] Representative examples of tungsten and molybdenum complexes also include oxo complexes. Suitable oxo tungsten complexes include tungstate and tungsten oxide complexes. Suitable tungstate complexes include ammonium tungstate, calcium tungstate, sodium tungstate dihydrate, and tungstic acid. Suitable tungsten oxides include tungsten (IV) oxide and tungsten (VI) oxide. Suitable oxo molybdenum complexes include molybdate, molybdenum oxide, and molybdenyl complexes. Suitable molybdate complexes include ammonium molybdate and its hydrates, sodium molybdate and its hydrates, and potassium molybdate and its hydrates. Suitable molybdenum oxides include molybdenum (VI) oxide, molybdenum (VI) oxide, and molybdic acid. Suitable molybdenyl complexes include, for example, molybdenyl acetylacetonate. Other suitable tungsten and molybdenum complexes include hydroxo derivatives derived from, for example, glycerol, tartaric acid, and sugars.

[0776] A wide variety of other anti-angiogenic factors may also be utilized within the context of the present invention. Representative examples include platelet factor 4; protamine sulphate; sulphated chitin derivatives (prepared from queen crab shells), (Murata et al., Cancer Res. 51:22-26, 1991); Sulphated Polysaccharide Peptidoglycan Complex (SP- PG) (the function of this compound may be enhanced by the presence of steroids such as estrogen, and tamoxifen citrate); Staurosporine; modulators of matrix metabolism, including for example, proline analogs, cishydroxyproline, d,L-3,4-dehydroprouine, Thiaproline, alphaalpha-dipyridyl, aminopropionitrile fumarate; 4-propyl-5-(4-pyridinyl)-2(3H)-oxazolone; Methotrexate; Mitoxantrone; Heparin; Interferons; 2 Macroglobulin-serum; ChIMP-3 (Pavloff et al., J. Bio. Chem. 267:17321-17326, (1992)); Chymostatin (Tomkinson et al., Biochem J. 286:475-480, (1992)); Cyclodextrin Tetradecasulfate; Eponemycin; Camptothecin; Fumagilin (Ingber et al., Nature 348:555-557, 1990); Gold Sodium Thiomalate (“GST”; Matsubara and Ziff, J. Clin. Invest. 79:1440-1446, (1987)); anticollagenase-serum; alpha2-antiplasmin (Holmes et al., J. Biol. Chem. 262(4):1659-1664, (1987); Bisantrene (National Cancer Institute); Lobenzarit disodium (N-(2)-carboxyphenyl-4-chloroanthronilic acid disodium or “CCA”; Takeuchi et al., Agents Actions 36:312-316, (1992)); Thalidomide; Angostatic steroid; AGM-1470; carboxynaminolmidazole; and metalloproteinase inhibitors such as BB94.

[0777] Diseases at the Cellular Level

[0778] Diseases associated with increased cell survival or the inhibition of apoptosis that could be treated, prevented, diagnosed, and/or prognosed using fusion proteins of the invention and/or polynucleotides encoding albumin fusion proteins of the invention, include cancers (such as follicular lymphomas, carcinomas with p53 mutations, and hormone-dependent tumors, including, but not limited to colon cancer, cardiac tumors, pancreatic cancer, melanoma, retinoblastoma, glioblastoma, lung cancer, intestinal cancer, testicular cancer, stomach cancer, neuroblastoma, myxoma, myoma, lymphoma, endothelioma, osteoblastoma, osteoclastoma, osteosarcoma, chondrosarcoma, adenoma, breast cancer, prostate cancer, Kaposi's sarcoma and ovarian cancer); autoimmune disorders (such as, multiple sclerosis, Sjogren's syndrome, Hashimoto's thyroiditis, biliary cirrhosis, Behcet's disease, Crohn's disease, polymyositis, systemic lupus erythematosus and immune-related glomerulonephritis and rheumatoid arthritis) and viral infections (such as herpes viruses, pox viruses and adenoviruses), inflammation, graft v. host disease, acute graft rejection, and chronic graft rejection.

[0779] In preferred embodiments, fusion proteins of the invention and/or polynucleotides encoding albumin fusion proteins of the invention are used to inhibit growth, progression, and/or metasis of cancers, in particular those listed above.

[0780] Additional diseases. or conditions associated with increased cell survival that could be treated or detected by fusion proteins of the invention and/or polynucleotides encoding albumin fusion proteins of the invention include, but are not limited to, progression, and/or metastases of malignancies and related disorders such as leukemia (including acute leukemias (e.g., acute lymphocytic leukemia, acute myelocytic leukemia (including myeloblastic, promyelocytic, myelomonocytic, monocytic, and erythroleukemia)) and chronic leukemias (e.g., chronic myelocytic (granulocytic) leukemia and chronic lymphocytic leukemia)), polycythemia vera, lymphomas (e.g., Hodgkin's disease and non-Hodgkin's disease), multiple myeloma, Waldenstrom's macroglobulinemia, heavy chain disease, and solid tumors including, but not limited to, sarcomas and carcinomas such as fibrosarcoma, myxosarcoma, liposarcoma, chondrosarcoma, osteogenic sarcoma, chordoma, angiosarcoma, endotheliosarcoma, lymphangiosarcoma, lymphangioendotheliosarcoma, synovioma, mesothelioma, Ewing's tumor, leiomyosarcoma, rhabdomyosarcoma, colon carcinoma, pancreatic cancer, breast cancer, ovarian cancer, prostate cancer, squamous cell carcinoma, basal cell carcinoma, adenocarcinoma, sweat gland carcinoma, sebaceous gland carcinoma, papillary carcinoma, papillary adenocarcinomas, cystadenocarcinoma, medullary carcinoma, bronchogenic carcinoma, renal cell carcinoma, hepatoma, bile duct carcinoma, choriocarcinoma, seminoma, embryonal carcinoma, Wilm's tumor, cervical cancer, testicular tumor, lung carcinoma, small cell lung carcinoma, bladder carcinoma, epithelial carcinoma, glioma, astrocytoma, medulloblastoma, craniopharyngioma, ependymoma, pinealoma, hemangioblastoma, acoustic neuroma, oligodendroglioma, menangioma, melanoma, neuroblastoma, and retinoblastoma.

[0781] Diseases associated with increased apoptosis that could be treated, prevented, diagnosed, and/or prognesed using fusion proteins of the invention and/or polynucleotides encoding albumin fusion proteins of the invention, include, but are not limited to, AIDS; neurodegenerative disorders (such as Alzheimer's disease, Parkinson's disease, Amyotrophic lateral sclerosis, Retinitis pigmentosa, Cerebellar degeneration and brain tumor or prior associated disease); autoimmune disorders (such as, multiple sclerosis, Sjogren's syndrome, Hashimoto's thyroiditis, biliary cirrhosis, Behcet's disease, Crohn's disease, polymyositis, systemic lupus erythematosus and immune-related glomerulonephritis and rheumatoid arthritis) myelodysplastic syndromes (such as aplastic anemia), graft v. host disease, ischemic injury (such as that caused by myocardial infarction, stroke and reperfusion injury), liver injury (e.g., hepatitis related liver injury, ischemia/reperfusion injury, cholestosis (bile duct injury) and liver cancer); toxin-induced liver disease (such as that caused by alcohol), septic shock, cachexia and anorexia.

[0782] Wound Healine and Epithelial Cell Proliferation

[0783] In accordance with yet a further aspect of the present invention, there is provided a process for utilizing fusion proteins of the invention and/or polynucleotides encoding albumin fusion proteins of the invention, for therapeutic purposes, for example, to stimulate epithelial cell proliferation and basal keratinocytes for the purpose of wound healing, and to stimulate hair follicle production and healing of dermal wounds. Albumin fusion proteins of the invention and/or polynucleotides encoding albumin fusion proteins of the invention, may be clinically useful in stimulating wound healing including surgical wounds, excisional wounds, deep wounds involving damage of the dermis and epidermis, eye tissue wounds, dental tissue wounds, oral cavity wounds, diabetic ulcers, dermal ulcers, cubitus ulcers, arterial ulcers, venous stasis ulcers, burns resulting from heat exposure or chemicals, and other abnormal wound healing conditions such as uremia, malnutrition, vitamin deficiencies and complications associated with systemic treatment with steroids, radiation therapy and antineoplastic drugs and antimetabolites. Albumin fusion proteins of the invention and/or polynucleotides encoding albumin fusion proteins of the invention, could be used to promote dermal reestablishment subsequent to dermal loss

[0784] Albumin fusion proteins of the invention and/or polynucleotides encoding albumin fusion proteins of the invention, could be used to increase the adherence of skin grafts to a wound bed and to stimulate re-epithelialization from the wound bed. The following are types of grafts that fusion proteins of the invention and/or polynucleotides encoding albumin fusion proteins of the invention, could be used to increase adherence to a wound bed: autografts, artificial skin, allografts, autodermic graft, autoepdermic grafts, avacular grafts, Blair-Brown grafts, bone graft, brephoplastic grafts, cutis graft, delayed graft, dermic graft, epidermic graft, fascia graft, full thickness graft, heterologous graft, xenograft, homologous graft, hyperplastic graft, lamellar graft, mesh graft, mucosal graft, Ollier-Thiersch graft, omenpal graft, patch graft, pedicle graft, penetrating graft, split skin graft, thick split graft. Albumin fusion proteins of the invention and/or polynucleotides encoding albumin fusion proteins of the invention, can be used to promote skin strength and to improve the appearance of aged skin.

[0785] It is believed that fusion proteins of the invention and/or polynucleotides encoding albumin fusion proteins of the invention, will also produce changes in hepatocyte proliferation, and epithelial cell proliferation in the lung, breast, pancreas, stomach, small intestine, and large intestine. Albumin fusion proteins of the invention and/or polynucleotides encoding albumin fusion proteins of the invention, could promote proliferation of epithelial cells such as sebocytes, hair follicles, hepatocytes, type II pneumocytes, mucin-producing goblet cells, and other epithelial cells and their progenitors contained within the skin, lung, liver, and gastrointestinal tract. Albumin fusion proteins of the invention and/or polynucleotides encoding albumin fusion proteins of the invention, may promote proliferation of endothelial cells, keratinocytes, and basal keratinocytes.

[0786] Albumin fusion proteins of the invention and/or polynucleotides encoding albumin fusion proteins of the invention, could also be used to reduce the side effects of gut toxicity that result from radiation, chemotherapy treatments or viral infections. Albumin fusion proteins of the invention and/or polynucleotides encoding albumin fusion proteins of the invention, may have a cytoprotective effect on the small intestine mucosa. Albumin fusion proteins of the invention and/or polynucleotides encoding albumin fusion proteins of the invention, may also stimulate healing of mucositis (mouth ulcers) that result from chemotherapy and viral infections.

[0787] Albumin fusion proteins of the invention and/or polynucleotides encoding albumin fusion proteins of the invention, could further be used in full regeneration of skin in full and partial thickness skin defects, including burns, (i.e., repopulation of hair follicles, sweat glands, and sebaceous glands), treatment of other skin defects such as psoriasis. Albumin fusion proteins of the invention and/or polynucleotides encoding albumin fusion proteins of the invention, could be used to treat epidermolysis bullosa, a defect in adherence of the epidermis to the underlying dermis which results in frequent, open and painful blisters by accelerating reepithelialization of these lesions. Albumin fusion proteins of the invention and/or polynucleotides encoding albumin fusion proteins of the invention, could also be used to treat gastric and doudenal ulcers and help heal by scar formation of the mucosal lining and regeneration of glandular mucosa and duodenal mucosal lining more rapidly. Inflammatory bowel diseases, such as Crohn's disease and ulcerative colitis, are diseases which result in destruction of the mucosal surface of the small or large intestine, respectively. Thus, fusion proteins of the invention and/or polynucleotides encoding albumin fusion proteins of the invention, could be used to promote the resurfacing of the mucosal surface to aid more rapid healing and to prevent progression of inflammatory bowel disease. Treatment with fusion proteins of the invention and/or polynucleotides encoding albumin fusion proteins of the invention, is expected to have a significant effect on the production of mucus throughout the gastrointestinal tract and could be used to protect the intestinal mucosa from injurious substances that are ingested or following surgery. Albumin fusion proteins of the invention and/or polynucleotides encoding albumin fusion proteins of the invention, could be used to treat diseases associate with the under expression.

[0788] Moreover, fusion proteins of the invention and/or polynucleotides encoding albumin fusion proteins of the invention, could be used to prevent and heal damage to the lungs due to various pathological states. Albumin fusion proteins of the invention and/or polynucleotides encoding albumin fusion proteins of the invention, which could stimulate proliferation and differentiation and promote the repair of alveoli and brochiolar epithelium to prevent or treat acute or chronic lung damage. For example, emphysema, which results in the progressive loss of aveoli, and inhalation injuries, i.e., resulting from smoke inhalation and burns, that cause necrosis of the bronchiolar epithelium and alveoli could be effectively treated using polynucleotides or polypeptides, agonists or antagonists of the present invention. Also fusion proteins of the invention and/or polynucleotides encoding albumin fusion proteins of the invention, could be used to stimulate the proliferation of and differentiation of type II pneumocytes, which may help treat or prevent disease such as hyatine membrane diseases, such as infant respiratory distress syndrome and bronchopulmonary displasia, in premature infants.

[0789] Albumin fusion proteins of the invention and/or polynucleotides encoding albumin fusion proteins of the invention, could stimulate the proliferation and differentiation of hepatocytes and, thus, could be used to alleviate or treat liver diseases and pathologies such as fulminant liver failure caused by cirrhosis, liver damage caused by viral hepatitis and toxic substances (i.e., acetaminophen, carbon tetraholoride and other hepatotoxins known in the art).

[0790] In addition, fusion proteins of the invention and/or polynucleotides encoding albumin fusion proteins of the invention, could be used treat or prevent the onset of diabetes melitus. -In patients with newly diagnosed Types I and II diabetes, where some islet cell function remains, fusion proteins of the invention and/or polynucleotides encoding albumin fusion proteins of the invention, could be used to maintain the islet function so as to alleviate, delay or prevent permanent manifestation of the disease. Also, fusion proteins of the invention and/or polynucleotides encoding albumin fusion proteins of the invention, could be used as an auxiliary in islet cell transplantation to improve or promote islet cell function.

[0791] Neural Activity and Neurological Diseases

[0792] The albumin fusion proteins of the invention and/or polynucleotides encoding albumin fusion proteins of the invention may be used for the diagnosis and/or treatment of diseases, disorders, damage or injury of the brain and/or nervous system. Nervous system disorders that can be treated with the compositions of the invention (e.g., fusion proteins of the invention and/or polynucleotides encoding albumin fusion proteins of the invention), include, but are not limited to, nervous system injuries, and diseases or disorders which result in either a disconnection of axons, a diminution or degeneration of neurons, or demyelination. Nervous system lesions which may be treated in a patient (including human and non-human mammalian patients) according to the methods of the invention, include but are not limited to, the following lesions of either the central (including spinal cord, brain) or peripheral nervous systems: (1) ischemic lesions, in which a lack of oxygen in a portion of the nervous system results in neuronal injury or death, including cerebral infarction or ischemia, or spinal cord infarction or ischemia; (2) traumatic lesions, including lesions caused by physical injury or associated with surgery, for example, lesions which sever a portion of the nervous system, or compression injuries; (3) malignant lesions, in which a portion of the nervous system is destroyed or injured by malignant tissue which is either a nervous system associated malignancy or a malignancy derived from non-nervous system tissue; (4) infectious lesions, in which a portion of the nervous system is destroyed or injured as a result of infection, for example, by an abscess or associated with infection by human immunodeficiency virus, herpes zoster, or herpes simplex virus or with Lyme disease, tuberculosis, or syphilis; (5) degenerative lesions, in which a portion of the nervous system is destroyed or injured as a result of a degenerative process including but not limited to, degeneration associated with Parkinson's disease, Alzheimer's disease, Huntington's chorea, or amyotrophic lateral sclerosis (ALS); (6) lesions associated with nutritional diseases or disorders, in which a portion of the nervous system is destroyed or injured by a nutritional disorder or disorder of metabolism including, but not limited to, vitamin B12 deficiency, folic acid deficiency, Wernicke disease, tobacco-alcohol amblyopia, Marchiafava-Bignami disease (primary degeneration of the corpus callosum), and alcoholic cerebellar degeneration; (7) neurological lesions associated with systemic diseases including, but not limited to, diabetes (diabetic neuropathy, Bell's palsy), systemic lupus erythematosus, carcinoma, or sarcoidosis; (8) lesions caused by toxic substances including alcohol, lead, or particular neurotoxins; and (9) demyelinated lesions in which a portion of the nervous system is destroyed or injured by a demyelinating disease including, but not limited to, multiple sclerosis, human immunodeficiency virus-associated myelopathy, transverse myelopathy or various etiologies, progressive multifocal leukoencephalopathy, and central pontine myelinolysis.

[0793] In one embodiment, the albumin fusion proteins of the invention and/or polynucleotides encoding albumin fusion proteins of the invention are used to protect neural cells from the damaging effects of hypoxia. In a further preferred embodiment, the albumin fusion proteins of the invention and/or polynucleotides encoding albumin fusion proteins of the invention are used to protect neural cells from the damaging effects of cerebral hypoxia. According to this embodiment, the compositions of the invention are used to treat or prevent neural cell injury associated with cerebral hypoxia. In one non-exclusive aspect of this embodiment, the albumin fusion proteins of the invention and/or polynucleotides encoding albumin fusion proteins of the invention, are used to treat or prevent neural cell injury associated with cerebral ischemia. In another non-exclusive aspect of this embodiment, the albumin fusion proteins of the invention and/or polynucleotides encoding albumin fusion proteins of the invention are used to treat or prevent neural cell injury associated with cerebral infarction.

[0794] In another preferred embodiment, albumin fusion proteins of the invention and/or polynucleotides encoding albumin fusion proteins of the invention are used to treat or prevent neural cell injury associated with a stroke. In a specific embodiment, albumin fusion proteins of the invention and/or polynucleotides encoding albumin fusion proteins of the invention are used to treat or prevent cerebral neural cell injury associated with a stroke.

[0795] In another preferred embodiment, albumin fusion proteins of the invention and/or polynucleotides encoding albumin fusion proteins of the invention are used to treat or prevent neural cell injury associated with a heart attack. In a specific embodiment, albumin fusion proteins of the invention and/or polynucleotides encoding albumin fusion proteins of the invention are used to treat or prevent cerebral neural cell injury associated with a heart attack.

[0796] The compositions of the invention which are useful for treating or preventing a nervous system disorder may be selected by testing for biological activity in promoting the survival or differentiation of neurons. For example, and not by way of limitation, compositions of the invention which elicit any of the following effects may be useful according to the invention: (1) increased survival time of neurons in culture either in the presence or absence of hypoxia or hypoxic conditions; (2) increased sprouting of neurons in culture or in vivo; (3) increased production of a neuron-associated molecule in culture or in vivo, e.g., choline acetyltransferase or acetylcholinesterase with respect to motor neurons; or (4) decreased symptoms of neuron dysfunction in vivo. Such effects may be measured by any method known in the art. In preferred, non-limiting embodiments, increased survival of neurons may routinely be measured using a method set forth herein or otherwise known in the art, such as, for example, in Zhang et al., Proc Natl Acad Sci USA 97:3637-42 (2000) or in Arakawa et al., J. Neurosci., 10:3507-15 (1990); increased sprouting of neurons may be detected by methods known in the art, such as, for example, the methods set forth in Pestronk et al., Exp. Neurol., 70:65-82 (1980), or Brown et al., Ann. Rev. Neurosci., 4:17-42 (1981); increased production of neuron-associated molecules may be measured by bioassay, enzymatic assay, antibody binding, Northern blot assay, etc., using techniques known in the art and depending on the molecule to be measured; and motor neuron dysfunction may be measured by assessing the physical manifestation of motor neuron disorder, e.g., weakness, motor neuron conduction velocity, or functional disability.

[0797] In specific embodiments, motor neuron disorders that may be treated according to the invention include, but are not limited to, disorders such as infarction, infection, exposure to toxin, trauma, surgical damage, degenerative disease or malignancy that may affect motor neurons as well as other components of the nervous system, as well as disorders that selectively affect neurons such as amyotrophic lateral sclerosis, and including, but not limited to, progressive spinal muscular atrophy, progressive bulbar palsy, primary lateral sclerosis, infantile and juvenile muscular atrophy, progressive bulbar paralysis of childhood (Fazio-Londe syndrome), poliomyelitis and the post polio syndrome, and Hereditary Motorsensory Neuropathy (Charcot-Marie-Tooth Disease).

[0798] Further, fusion proteins of the invention and/or polynucleotides encoding albumin fusion proteins of the invention may play a role in neuronal survival; synapse formation; conductance; neural differentiation, etc. Thus, compositions of the invention (including fusion proteins of the invention and/or polynucleotides encoding albumin fusion proteins of the invention) may be used to diagnose and/or treat or prevent diseases or disorders associated with these roles, including, but not limited to, learning and/or cognition disorders. The compositions of the invention may also be useful in the treatment or prevention of neurodegenerative disease states and/or behavioural disorders. Such neurodegenerative disease states and/or behavioral disorders include, but are not limited to, Alzheimer's Disease, Parkinson's Disease, Huntington's Disease, Tourette Syndrome, schizophrenia, mania, dementia, paranoia, obsessive compulsive disorder, panic disorder, learning disabilities, ALS, psychoses, autism, and altered behaviors, including disorders in feeding, sleep patterns, balance, and perception. In addition, compositions of the invention may also play a role in the treatment, prevention and/or detection of developmental disorders associated with the developing embryo, or sexually-linked disorders.

[0799] Additionally, fusion proteins of the invention and/or polynucleotides encoding albumin fusion proteins of the invention, may be useful in protecting neural cells from diseases, damage, disorders, or injury, associated with cerebrovascular disorders including, but not limited to, carotid artery diseases (e.g., carotid artery thrombosis, carotid stenosis, or Moyamoya Disease), cerebral amyloid angiopathy, cerebral aneurysm, cerebral anoxia, cerebral arteriosclerosis, cerebral arteriovenous malformations, cerebral artery diseases, cerebral embolism and thrombosis (e.g., carotid artery thrombosis, sinus thrombosis, or Wallenberg's Syndrome), cerebral hemorrhage (e.g., epidural or subdural hematoma, or subarachnoid hemorrhage), cerebral infarction, cerebral ischemia (e.g., transient cerebral ischemia, Subclavian Steal Syndrome, or vertebrobasilar insufficiency), vascular dementia (e.g., multi-infarct), leukomalacia, periventricular, and vascular headache (e.g., cluster headache or migraines).

[0800] In accordance with yet a further aspect of the present invention, there is provided a process for utilizing fusion proteins of the invention and/or polynucleotides encoding albumin fusion proteins of the invention, for therapeutic purposes, for example, to stimulate neurological cell proliferation and/or differentiation. Therefore, fusion proteins of the invention and/or polynucleotides encoding albumin fusion proteins of the invention may be used to treat and/or detect neurologic diseases. Moreover, fusion proteins of the invention and/or polynucleotides encoding albumin fusion proteins of the invention, can be used as a marker or detector of a particular nervous system disease or disorder.

[0801] Examples of neurologic diseases which can be treated or detected with fusion proteins of the invention and/or polynucleotides encoding albumin fusion proteins of the invention include, brain diseases, such as metabolic brain diseases which includes phenylketonuria such as maternal phenylketonuria, pyruvate carboxylase deficiency, pyruvate dehydrogenase complex deficiency, Wernicke's Encephalopathy, brain edema, brain neoplasms such as cerebellar neoplasms which include infratentorial neoplasms, cerebral ventricle neoplasms such as choroid plexus neoplasms, hypothalamic neoplasms, supratentorial neoplasms, canavan disease, cerebellar diseases such as cerebellar ataxia which include spinocerebellar degeneration such as ataxia telangiectasia, cerebellar dyssynergia, Friederich's Ataxia, Machado-Joseph Disease, olivopontocerebellar atrophy, cerebellar neoplasms such as infratentorial neoplasms, diffuse cerebral sclerosis such as encephalitis periaxialis, globoid cell leukodystrophy, metachromatic leukodystrophy and subacute sclerosing panencephalitis.

[0802] Additional neurologic diseases which can be treated or detected with fusion proteins of the invention and/or polynucleotides encoding albumin fusion proteins of the invention include cerebrovascular disorders (such as carotid artery diseases which include carotid artery thrombosis, carotid stenosis and Moyamoya Disease), cerebral amyloid angiopathy, cerebral aneurysm, cerebral anoxia, cerebral arteriosclerosis, cerebral arteriovenous malformations, cerebral artery diseases, cerebral embolism and thrombosis such as carotid artery thrombosis, sinus thrombosis and Wallenberg's Syndrome, cerebral hemorrhage such as epidural hematoma, subdural hematoma and subarachnoid hemorrhage, cerebral infarction, cerebral ischemia such as transient cerebral ischemia, Subclavian Steal Syndrome and vertebrobasilar insufficiency, vascular dementia such as multi-infarct dementia, periventricular leukomalacia, vascular headache such as cluster headache and migraine.

[0803] Additional neurologic diseases which can be treated or detected with fusion proteins of the invention and/or polynucleotides encoding albumin fusion proteins of the invention include dementia such as AIDS Dementia Complex, presenile dementia such as Alzheimer's Disease and Creutzfeldt-Jakob Syndrome, senile dementia such as Alzheimer's Disease and progressive supranuclear palsy, vascular dementia such as multi-infarct dementia, encephalitis which include encephalitis periaxialis, viral encephalitis such as epidemic encephalitis, Japanese Encephalitis, St. Louis Encephalitis, tick-borne encephalitis and West Nile Fever, acute disseminated encephalomyelitis, meningoencephalitis such as uveomeningoencephalitic syndrome, Postencephalitic Parkinson Disease and subacute sclerosing panencephalitis, encephalomalacia such as periventricular leukomalacia, epilepsy such as generalized epilepsy which includes infantile spasms, absence epilepsy, myoclonic epilepsy which includes MERRF Syndrome, tonic-clonic epilepsy, partial epilepsy such as complex partial epilepsy, frontal lobe epilepsy and temporal lobe epilepsy, post-traumatic epilepsy, status epilepticus such as Epilepsia Partialis Continua, and Hallervorden-Spatz Syndrome.

[0804] Additional neurologic diseases which can be treated or detected with fusion proteins of the invention and/or polynucleotides encoding albumin fusion proteins of the invention include hydrocephalus such as Dandy-Walker Syndrome and normal pressure hydrocephalus, hypothalamic diseases such as hypothalamic neoplasms, cerebral malaria, narcolepsy which includes cataplexy, bulbar poliomyelitis, cerebri pseudotumor, Rett Syndrome, Reye's Syndrome, thalamic diseases, cerebral toxoplasmosis, intracranial tuberculoma and Zellweger Syndrome, central. nervous system infections. such as AIDS Dementia Complex, Brain Abscess, subdural empyema, encephalomyelitis such as Equine Encephalomyelitis, Venezuelan Equine Encephalomyelitis, Necrotizing Hemorrhagic Encephalomyelitis, Visna, and cerebral malaria.

[0805] Additional neurologic diseases which can be treated or detected with fusion proteins of the invention and/or polynucleotides encoding albumin fusion proteins of the invention include meningitis such as arachnoiditis, aseptic meningtitis such as viral meningtitis which includes lymphocytic choriomeningitis, Bacterial meningtitis which includes Haemophilus Meningtitis, Usteria Meningtitis, Meningococcal Meningtitis such as Waterhouse-Friderichsen Syndrome, Pneumococcal Meningtitis and meningeal tuberculosis, fungal meningitis such as Cryptococcal Meningtitis, subdural effusion, meningoencephalitis such as uvemeningoencephalitic syndrome, myelitis such as transverse myelitis, neurosyphilis such as tabes dorsalis, poliomyelitis which includes bulbar poliomyelitis and postpoliomyelitis syndrome, prion diseases (such as Creutzfeldt-Jakob Syndrome, Bovine Spongiform Encephalopathy, Gerstmann-Straussler Syndrome, Kuru, Scrapie), and cerebral toxoplasmosis.

[0806] Additional neurologic diseases which can be treated or detected with fusion proteins of the invention and/or polynucleotides encoding albumin fusion proteins of the invention include central nervous system neoplasms such as brain neoplasms that include cerebellar neoplasms such as infratentorial neoplasms, cerebral ventricle neoplasms such as choroid plexus neoplasms, hypothalamic neoplasms and supratentorial neoplasms, meningeal neoplasms, spinal cord neoplasms which include epidural neoplasms, demyelinating diseases such as Canavan Diseases, diffuse cerebral sceloris which includes adrenoleukodystrophy, encephalitis periaxialis, globoid cell leukodystrophy, diffuse cerebral sclerosis such as metachiromatic leukodystrophy, allergic encephalomyelitis, necrotizing hemorrhagic encephalomyelitis, progressive multifocal leukoencephalopathy, multiple sclerosis, central pontine myelinolysis, transverse myelitis, neuromyelitis optica, Scrapie, Swayback, Chronic Fatigue Syndrome, Visna, High Pressure Nervous Syndrome, Meningism, spinal cord diseases such as amyotonia congenita, amyotrophic lateral sclerosis, spinal muscular atrophy such as Werdnig-Hoffmann Disease, spinal cord compression, spinal cord neoplasms such as epidural neoplasms, syringomyelia, Tabes Dorsalis, Stiff-Man Syndrome, mental retardation such as Angelman Syndrome, Cri-du-Chat Syndrome, De Lange's Syndrome, Down Syndrome, Gangliosidoses such as gangliosidoses G(M1), Sandhoff Disease, Tay-Sachs Disease, Hartnup Disease, homocystinuria, Laurence-Moon-Biedl Syndrome, Lesch-Nyhan Syndrome, Maple Syrup Urine Disease, mucolipidosis such as fucosidosis, neuronal ceroid-lipofuscinosis, oculocerebrorenal syndrome, phenylketonuria such as maternal phenylketonuria, Prader-Willi Syndrome, Rett Syndrome, Rubinstein-Taybi Syndrome, Tuberous Sclerosis, WAGR Syndrome, nervous system abnormalities such as holoprosencephaly, neural tube defects such as anencephaly which includes hydrangencephaly, Amold-Chairi Deformity, encephalocele, meningocele, meningomyelocele, spinal dysraphism such as spina bifida cystica and spina bifida occulta.

[0807] Additional neurologic diseases which can be treated or detected with fusion proteins of the invention and/or polynucleotides encoding albumin fusion proteins of the invention include hereditary motor and sensory neuropathies which include Charcot-Marie Disease, Hereditary optic atrophy, Refsum's Disease, hereditary spastic paraplegia, Werdnig-Hoffmann Disease, Hereditary Sensory and Autonomic Neuropathies such as Congenital Analgesia and Familial Dysautonomia, Neurologic manifestations (such as agnosia that include Gerstmann's Syndrome, Amnesia such as retrograde amnesia, apraxia, neurogenic bladder, cataplexy, communicative disorders such as hearing disorders that includes deafness, partial hearing loss, loudness recruitment and tinnitus, language disorders such as aphasia which include agraphia, anomia, broca aphasia, and Wemicke Aphasia, Dyslexia such as Acquired Dyslexia, language development disorders, speech disorders such as aphasia which includes anomia, broca aphasia and Wernicke Aphasia, articulation disorders, communicative disorders such as speech disorders which include dysarthria, echolalia, mutism and stuttering, voice disorders such as aphonia and hoarseness, decerebrate state, delirium, fasciculation, hallucinations, meningism, movement disorders such as angelman syndrome, ataxia, athetosis, chorea, dystonia, hypokinesia, muscle hypotonia, myoclonus, tic, torticollis and tremor, muscle hypertonia such as muscle rigidity such as stiff-man syndrome, muscle spasticity, paralysis such as facial paralysis which includes Herpes Zoster Oticus, Gastroparesis, Hemiplegia, ophthalmoplegia such as diplopia, Duane's Syndrome, Homer's Syndrome, Chronic progressive external ophthalmoplegia such as Kearns Syndrome, Bulbar Paralysis, Tropical Spastic Paraparesis, Paraplegia such as Brown-Sequard Syndrome, quadriplegia, respiratory paralysis and vocal cord paralysis, paresis, phantom limb, taste disorders such as ageusia and dysgeusia, vision disorders such as anblyopia, blindness, color vision defects, diplopia, hemianopsia, scotoma and subnormal vision, sleep disorders such as hypersomnia which includes Kleine-Levin Syndrome, insomnia, and somnambulism, spasm such as trismus, unconsciousness such as coma, persistent vegetative state and syncope and vertigo, neuromuscular diseases such as amyotonia congenita, amyotrophic lateral sclerosis, Lambert-Eaton Myasthenic Syndrome, motor neuron disease, muscular atrophy such as spinal muscular atrophy, Charcot-Marie Disease and Werdnig-Hoffmann Disease, Postpoliomyelitis Syndrome, Muscular Dystrophy, Myasthenia Gravis, Myotonia Atrophica, Myotonia Confenita, Nemaline Myopathy, Familial Periodic Paralysis, Multiplex Paramyloclonus, Tropical Spastic Paraparesis and Stiff-Man Syndrome, peripheral nervous system diseases such as acrodynia, amyloid neuropathies, autonomic nervous system diseases such as Adie's Syndrome, Barre-Lieou Syndrome, Familial Dysautonomia, Homer's Syndrome, Reflex Sympathetic Dystrophy and Shy-Drager Syndrome, Cranial Nerve Diseases such as Acoustic Nerve Diseases such as Acoustic Neuroma which includes Neurofibromatosis 2, Facial Nerve Diseases such as Facial Neuralgia, Melkersson-Rosenthal Syndrome, ocular motility disorders which includes amblyopia, nystagmus, oculomotor nerve paralysis, ophthalmoplegia such as Duane's Syndrome, Homer's Syndrome, Chronic Progressive Extemal Ophthalmoplegia which includes Kearns Syndrome, Strabismus such as Esotropia and Exotropia, Oculomotor Nerve Paralysis, Optic Nerve Diseases such as Optic Atrophy which includes Hereditary Optic Atrophy, Optic Disk Drusen, Optic Neuritis such as Neuromyelitis Optica, Papilledema, Trigeminal Neuralgia, Vocal Cord Paralysis, Demyelinating Diseases such as Neuromyelitis Optica and Swayback, and Diabetic neuropathies such as diabetic foot.

[0808] Additional neurologic diseases which can be treated or detected with fusion proteins of the invention and/or polynucleotides encoding albumin fusion proteins of the invention include nerve compression syndromes such as carpal tunnel syndrome, tarsal tunnel syndrome, thoracic outlet syndrome such as cervical rib syndrome, ulnar nerve compression syndrome, neuralgia such as causalgia, cervico-brachial neuralgia, facial neuralgia and trigeminal neuralgia, neuritis such as experimental allergic neuritis, optic neuritis, polyneuritis, polyradiculoneuritis and radiculities such as polyradiculitis, hereditary motor and sensory neuropathies such as Charcot-Marie Disease, Hereditary Optic Atrophy, Refsum's Disease, Hereditary Spastic Paraplegia and Werdnig-Hoffmann Disease, Hereditary Sensory and Autonomic Neuropathies which include Congenital Analgesia and Familial Dysautonomia, POEMS Syndrome, Sciatica, Gustatory Sweating and Tetany).

[0809] Endocrine Disorders

[0810] Albumin fusion proteins of the invention and/or polynucleotides encoding albumin fusion proteins of the invention, may be used to treat, prevent, diagnose, and/or prognose disorders and/or diseases related to hormone imbalance, and/or disorders or diseases of the endocrine system.

[0811] Hormones secreted by the glands of the endocrine system control physical growth, sexual function, metabolism, and other functions. Disorders may be classified in two ways: disturbances in the production of hormones, and the inability of tissues to respond to hormones. The etiology of these hormone imbalance or endocrine system diseases, disorders or conditions may be genetic, somatic, such as cancer and some autoimmune diseases, acquired (e.g., by chemotherapy, injury or toxins), or infectious. Moreover, fusion proteins of the invention and/or polynucleotides encoding albumin fusion proteins of the invention can be used as a marker or detector of a particular disease or disorder related to the endocrine system and/or hormone imbalance.

[0812] Endocrine system and/or hormone imbalance and/or diseases encompass disorders of uterine motility including, but not limited to: complications with pregnancy and labor (e.g., pre-term labor, post-term pregnancy, spontaneous abortion, and slow or stopped labor); and disorders and/or diseases of the menstrual cycle (e.g., dysmenorrhea and endometriosis).

[0813] Endocrine system and/or hormone imbalance disorders and/or diseases include disorders and/or diseases of the pancreas, such as, for example, diabetes mellitus, diabetes insipidus, congenital pancreatic agenesis, pheochromocytoma-islet cell tumor syndrome; disorders and/or diseases of the adrenal glands such as, for example, Addison's Disease, corticosteroid deficiency, virilizing disease, hirsutism, Cushing's Syndrome, hyperaldosteronism, pheochromocytoma; disorders and/or diseases of the pituitary gland, such as, for example, hyperpituitarism, hypopituitarism, pituitary dwarfism, pituitary adenoma, panhypopituitarism, acromegaly, gigantism; disorders and/or diseases of the thyroid, including but not limited to, hyperthyroidism, hypothyroidism, Plummer's disease, Graves' disease (toxic diffuse goiter), toxic nodular goiter, thyroiditis (Hashimoto's thyroiditis, subacute granulomatous thyroiditis, and silent lymphocytic thyroiditis), Pendred's syndrome, myxedema, cretinism, thyrotoxicosis, thyroid hormone coupling defect, thymic aplasia, Hurthle cell tumours of the thyroid, thyroid cancer, thyroid carcinoma, Medullary thyroid carcinoma; disorders and/or diseases of the parathyroid, such as, for example, hyperparathyroidism, hypoparathyroidism; disorders and/or diseases of the hypothalamus.

[0814] In addition, endocrine system and/or hormone imbalance disorders and/or diseases may also include disorders and/or diseases of the testes or ovaries, including cancer. Other disorders and/or diseases of the testes or ovaries further include, for example, ovarian cancer, polycystic ovary syndrome, Klinefelter's syndrome, vanishing testes syndrome (bilateral anorchia), congenital absence of Leydig's cells, cryptorchidism, Noonan's syndrome, myotonic dystrophy, capillary haemangioma of the testis (benign), neoplasias of the testis and neo-testis.

[0815] Moreover, endocrine system and/or hormone imbalance disorders and/or diseases may also include disorders and/or diseases such as, for example, polyglandular deficiency syndromes, pheochromocytoma, neuroblastoma, multiple Endocrine neoplasia, and disorders and/or cancers of endocrine tissues.

[0816] In another embodiment, albumin fusion proteins of the invention and/or polynucleotides encoding albumin fusion proteins of the invention, may be used to diagnose, prognose, prevent, and/or treat endocrine diseases and/or disorders associated with the tissue(s) in which the Therapeutic protein corresponding to the Therapeutic protein portion of the albumin protein of the invention is expressed,

[0817] Reproductive System Disorders

[0818] The albumin fusion proteins of the invention and/or polynucleotides encoding albumin fusion proteins of the invention may be used for the diagnosis, treatment, or prevention of diseases and/or disorders of the reproductive system. Reproductive system disorders that can be treated by the compositions of the invention, include, but are not limited to, reproductive system injuries, infections, neoplastic disorders, congenital defects, and diseases or disorders which result in infertility, complications with pregnancy, labor, or parturition, and postpartum difficulties.

[0819] Reproductive system disorders and/or diseases include diseases and/or disorders of the testes, including testicular atrophy, testicular feminization, cryptorchism (unilateral and bilateral), anorchia, ectopic testis, epididymitis and orchitis (typically resulting from infections such as, for example, gonorrhea, mumps, tuberculosis, and syphilis), testicular torsion, vasitis nodosa, germ cell tumors (e.g., seminomas, embryonal cell carcinomas, teratocarcinomas, choriocarcinomas, yolk sac tumors, and teratomas), stromal tumors (e.g., Leydig cell tumors), hydrocele, hematocele, varicocele, spermatocele, inguinal hernia, and disorders of sperm production (e.g., immotile cilia syndrome, aspermia, asthenozoospermia, azoospermia, oligospermia, and teratozoospermia).

[0820] Reproductive system disorders also include disorders of the prostate gland, such as acute non-bacterial prostatitis, chronic non-bacterial prostatitis, acute bacterial prostatitis, chronic bacterial prostatitis, prostatodystonia, prostatosis, granulomatous prostatitis, malacoplakia, benign prostatic hypertrophy or hyperplasia, and prostate neoplastic disorders, including adenocarcinomas, transitional cell carcinomas, ductal carcinomas, and squamous cell carcinomas.

[0821] Additionally, the compositions of the invention may be useful in the diagnosis, treatment, and/or prevention of disorders or diseases of the penis and urethra, including inflammatory disorders, such as balanoposthitis, balanitis xerotica obliteraiis, phimosis, paraphimosis, syphilis, herpes simplex virus, gonorrhea, non-gonococcal urethritis, chlamydia, mycoplasma, trichomonas, HIV, AIDS, Reiter's syndrome, condyloma acuminatum, condyloma latum, and pearly penile papules; urethral abnormalities, such as hypospadias, epispadias, and phimosis; premalignant lesions, including Erythroplasia of Queyrat, Bowen's disease, Bowenoid paplosis, giant condyloma of Buscke-Lowenstein, and varrucous carcinoma; penile cancers, including squamous cell carcinomas, carcinoma in situ, verrucous carcinoma, and disseminated penile carcinoma; urethral neoplastic disorders, including penile urethral carcinoma, bulbomembranous urethral carcinoma, and prostatic urethral carcinoma; and erectile disorders, such as priapism, Peyronie's disease, erectile dysfunction, and impotence.

[0822] Moreover, diseases and/or disorders of the vas deferens include vasculititis and CBAVD (congenital bilateral absence of the vas deferens); additionally, the albumin fusion proteins of the invention and/or polynucleotides encoding albumin fusion proteins of the invention may be used in the diagnosis, treatment, and/or prevention of diseases and/or disorders of the seminal vesicles, including hydatid disease, congenital chloride diarrhea, and polycystic kidney disease.

[0823] Other disorders and/or diseases of the male reproductive system include, for example, Klinefelter's syndrome, Young's syndrome, premature ejaculation, diabetes melitus, cystic fibrosis, Kartagener's syndrome, high fever, multiple sclerosis, and gynecomastia.

[0824] Further, the polynucleotides, fusion proteins of the invention and/or polynucleotides encoding albumin fusion proteins of the invention may be used in the diagnosis, treatment, and/or prevention of diseases and/or disorders of the vagina and vulva, including bacterial vaginosis, candida vaginitis, herpes simplex virus, chancroid, granuloma inguinale, lymphogranuloma venereum, scabies, human papillomavirus, vaginal trauma, vulvar trauma, adenosis, chlamydia vaginitis, gonorrhea, trichomonas vaginitis, condyloma acuminatum, syphilis, molluscum contagiosum, atrophic vaginitis, Paget's disease, lichen sclerosus, lichen planus, vulvodynia, toxic shock syndrome, vaginismus, vulvovaginitis, vulvar vestibulitis, and neoplastic disorders, such as squamous cell hyperplasia, clear cell carcinoma, basal cell carcinoma, melanomas, cancer of Bartholin's gland, and vulvar intraepithelial neoplasia.

[0825] Disorders and/or diseases of the uterus include dysmenorrhea, retroverted uterus, endometriosis, fibroids, adenomyosis, anovulatory bleeding, amenorrhea, Cushing's syndrome, hydatidiform moles, Asherman's syndrome, premature menopause, precocious puberty, uterine polyps, dysfunctional uterine bleeding (e.g., due to aberrant hormonal signals), and neoplastic disorders, such as adenocarcinomas, keiomyosarcomas, and sarcomas. Additionally, the albumin fusion proteins of the invention and/or polynucleotides encoding albumin fusion proteins of the invention may be useful as a marker or detector of, as well as in the diagnosis, treatment, and/or prevention of congenital uterine abnormalities, such as bicomuate uterus, septate uterus, simple unicomuate uterus, unicornuate uterus with a noncavitary rudimentary horn, unicornuate uterus with a non-communicating cavitary rudimentary horn, unicornuate uterus with a communicating cavitary horn, arcuate uterus, uterine didelfus, and T-shaped uterus.

[0826] Ovarian diseases and/or disorders include anovulation, polycystic ovary syndrome (Stein-Leventhal syndrome), ovarian cysts, ovarian hypofunction, ovarian insensitivity to gonadotropins, ovarian overproduction of androgens, right ovarian vein syndrome, amenorrhea, hirutism, and ovarian cancer (including, but not limited to, primary and secondary cancerous growth, Sertoli-Leydig tumors, endometriod carcinoma of the ovary, ovarian papillary serous adenocarcinoma, ovarian mucinous adenocarcinoma, and Ovarian Krukenberg tumors).

[0827] Cervical diseases and/or disorders include cervicitis, chronic cervicitis, mucopurulent cervicitis, cervical dysplasia, cervical polyps, Nabothian cysts, cervical erosion, cervical incompetence, and cervical neoplasms (including, for example, cervical carcinoma, squamous metaplasia, squamous cell carcinoma, adenosquamous cell neoplasia, and columnar cell neoplasia).

[0828] Additionally, diseases and/or disorders of the reproductive system include disorders and/or diseases of pregnancy, including miscarriage and stillbirth, such as early abortion, late abortion, spontaneous abortion, induced abortion, therapeutic abortion, threatened abortion, missed abortion, incomplete abortion, complete abortion, habitual abortion, missed abortion, and septic abortion; ectopic pregnancy, anemia, Rh incompatibility, vaginal bleeding during pregnancy, gestational diabetes, intrauterine growth retardation, polyhydramnios, HELLP syndrome, abruptio placentae, placenta previa, hyperemesis, preeclampsia, eclampsia, herpes gestationis, and urticaria of pregnancy. Additionally, the albumin fusion proteins of the invention and/or polynucleotides encoding albumin fusion proteins of the invention may be used in the diagnosis, treatment, and/or prevention of diseases that can complicate pregnancy, including heart disease, heart failure, rheumatic heart disease, congenital heart disease, mitral valve prolapse, high blood pressure, anemia, kidney disease, infectious disease (e.g., rubella, cytomegalovirus, toxoplasmosis, infectious hepatitis, chlamydia, HIW, AIDS, and genital herpes), diabetes mellitus, Graves' disease, thyroiditis, hypothyroidism, Hashimoto's thyroiditis, chronic active hepatitis, cirrhosis of the liver, primary biliary cirrhosis, asthma, systemic lupus eryematosis, rheumatoid arthritis, myasthenia gravis, idiopathic thrombocytopenic purpura, appendicitis, ovarian cysts, gallbladder disorders,and obstruction of the intestine.

[0829] Complications associated with labor and parturition include premature rupture of the membranes, pre-term labor, post-term pregnancy, postmaturity, labor that progresses too slowly, fetal distress (e.g., abnormal heart rate (fetal or matemal), breathing problems, and abnormal fetal position), shoulder dystocia, prolapsed umbilical cord, amniotic fluid embolism, and aberrant uterine bleeding.

[0830] Further, diseases and/or disorders of the postdelivery period, including endometritis, myometritis, parametritis, peritonitis, pelvic thrombophlebitis, pulmonary embolism, endotoxemia, pyelonephritis, saphenous thrombophlebitis, mastitis, cystitis, postpartum hemorrhage, and inverted uterus.

[0831] Other disorders and/or diseases of the female reproductive system that may be diagnosed, treated, and/or prevented by the albumin fusion proteins of the invention and/or polynucleotides encoding albumin fusion proteins of the invention include, for example, Turner's syndrome, pseudohermaphroditism, premenstrual syndrome, pelvic inflammatory disease, pelvic congestion (vascular engorgement), frigidity, anorgasmia, dyspareunia, ruptured fallopian tube, and Mittelschmerz.

[0832] Infectious Disease

[0833] Albumin fusion proteins of the invention and/or polynucleotides encoding albumin fusion proteins of the invention can be used to treat or detect infectious agents. For example, by increasing the immune response, particularly increasing the proliferation and differentiation of B and/or T cells, infectious diseases may be treated. The immune response may be increased by either enhancing an existing immune response, or by initiating a new immune response. Alternatively, fusion proteins of the invention and/or polynucleotides encoding albumin fusion proteins of the invention may also directly inhibit the infectious agent, without necessarily eliciting an immune response.

[0834] Viruses are one example of an infectious agent that can cause disease or symptoms that can be treated or detected by albumin fusion proteins of the invention and/or polynucleotides encoding albumin fusion proteins of the invention. Examples of viruses, include, but are not limited to Examples of viruses, include, but are not limited to the following DNA and RNA viruses and viral families: Arbovirus, Adenoviridae, Arenaviridae, Arterivirus, Bimaviridae, Bunyaviridae, Caliciviridae, Circoviridae, Coronaviridae, Dengue, EBV, HIV, Flaviviridae, Hepadnaviridae (Hepatitis), Herpesviridae (such as, Cytomegalovirus, Herpes Simplex, Herpes Zoster), Mononegavirus (e.g., Paramyxoviridae, Morbillivirus, Rhabdoviridae), Orthomyxoviridae (e.g., Influenza A, Influenza B, and parainfluenza), Papiloma virus, Papovaviridae, Parvoviridae, Picornaviridae, Poxviridae (such as Smallpox or Vaccinia), Reoviridae (e.g., Rotavirus), Retroviridae (HTLV-I, HTLV-II, Lentivirus), and Togaviridae (e.g., Rubivirus). Viruses falling within these families can cause a variety of diseases or symptoms, including, but not limited to: arthritis, bronchiolitis, respiratory syncytial virus, encephalitis, eye infections (e.g., conjunctivitis, keratitis), chronic fatigue syndrome, hepatitis (A, B, C, E, Chronic Active, Delta), Japanese B encephalitis, Junin, Chikungunya, Rift Valley fever, yellow fever, meningitis, opportunistic infections (e.g., AIDS), pneumonia, Burkitt's Lymphoma, chickenpox, hemorrhagic fever, Measles, Mumps, Parainfluenza, Rabies, the common cold, Polio, leukemia, Rubella, sexually transmitted diseases, skin diseases (e.g., Kaposi's, warts), and viremia. Albumin fusion proteins of the invention and/or polynucleotides encoding albumin fusion proteins of the invention, can be used to treat or detect any of these symptoms or diseases. In specific embodiments, fusion proteins of the invention and/or polynucleotides encoding albumin fusion proteins of the invention are used to treat: meningitis, Dengue, EBV, and/or hepatitis (e.g., hepatitis B). In an additional specific embodiment fusion proteins of the invention and/or polynucleotides encoding albumin fusion proteins of the invention are used to treat patients nonresponsive to one or more other commercially available hepatitis vaccines. In a further specific embodiment fusion proteins of the invention and/or polynucleotides encoding albumin fusion proteins of the invention are used to treat AIDS.

[0835] Similarly, bacterial and fungal agents that can cause disease or symptoms and that can be treated or detected by albumin fusion proteins of the invention and/or polynucleotides encoding albumin fusion proteins of the invention include, but not limited to, the following Gram-Negative and Gram-positive bacteria, bacterial families, and fungi: Actinomyces (e.g., Norcardia), Acinetobacter, Cryptococcus neoformans, Aspergillus, Bacillaceae (e.g., Bacillus anthrasis), Bacteroides (e.g., Bacteroides fragilis), Blastomycosis, Bordetella, Borrelia (e.g., Borrelia burgdorfen), Brucella, Candidia, Campylobacter, Chlamydia, Clostridium (e.g., Clostridium botulinum, Clostridium dificile, Clostridium perfringens, Clostridium tetani), Coccidioides, Corynebacterium (e.g., Corynebacterium diptheriae), Cryptococcus, Dermatocycoses, E. coli (e.g., Enterotoxigenic E. coli and Enterohemorrhagic E. coli), Enterobacter (e.g. Enterobacter aerogenes), Enterobacteriaceae (Kiebsiella, Salmonella (e.g., Salmonella typhi, Salmonella enteritidis, Salmonella typhi), Serratia, Yersinia, Shigella), Erysipelothrix, Haemophilus (e.g., Haemophilus influenza type B), Helicobacter, Legionella (e.g., Legionella pneumophila), Leptospira, Listeria (e.g., Listeria monocytogenes), Mycoplasma, Mycobacterium (e.g., Mycobacterium leprae and Mycobacterium tuberculosis), Vibrio (e.g., Vibrio cholerae), Neisseriaceae (e.g., Neisseria gonorrhea, Neisseria meningitidis), Pasteurellacea, Proteus, Pseudomonas (e.g., Pseudomonas aeruginos), Rickettsiaceae, Spirochetes (e.g., Treponema spp., Leptospira spp., Borrelia spp.), Shigella spp., Staphylococcus (e.g., Staphylococcus aureus), Meningiococcus, Pneumococcus and Streptococcus (e.g., Streptococcus pneumoniae and Groups A, B, and C Streptococci), and Ureaplasmas. These bacterial, parasitic, and fungal families can cause diseases or symptoms, including, but not limited to: antibiotic-resistant infections, bacteremia, endocarditis, septicemia, eye infections (e.g., conjunctivitis), uveitis, tuberculosis, gingivitis, bacterial diarrhea, opportunistic infections (e.g., AIDS related infections), paronychia, prosthesis-related infections, dental caries, Reiter's Disease, respiratory tract infections, such as Whooping Cough or Empyema, sepsis, Lyme Disease, Cat-Scratch Disease, dysentery, paratyphoid fever, food poisoning, Legionella disease, chronic and acute inflammation, erythema, yeast infections, typhoid, pneumonia, gonorrhea, meningitis (e.g., mengitis types A and B), chlamydia, syphillis, diphtheria, leprosy, brucellosis, peptic ulcers, anthrax, spontaneous abortions, birth defects, pneumonia, lung infections, ear infections, deafness, blindness, lethargy, malaise, vomiting, chronic diarrhea, Crohn's disease, colitis, vaginosis, sterility, pelvic inflammatory diseases, candidiasis, paratuberculosis, tuberculosis, lupus, botulism, gangrene, tetanus, impetigo, Rheumatic Fever, Scarlet Fever, sexually transmitted diseases, skin diseases (e.g., cellulitis, dermatocycoses), toxemia, urinary tract infections, wound infections, noscomial infections. Albumin fusion proteins of the invention and/or polynucleotides encoding albumin fusion proteins of the invention, can be used to treat or detect any of these symptoms or diseases. In specific embodiments, fusion proteins of the invention and/or polynucleotides encoding albumin fusion proteins of the invention are used to treat: tetanus, diptheria, botulism, and/or meningitis type B.

[0836] Moreover, parasitic agents causing disease or symptoms that can be treated, prevented, and/or diagnosed by fusion proteins of the invention and/or polynucleotides encoding albumin fusion proteins of the invention include, but not limited to, the following families or class: Amebiasis, Babesiosis, Coccidiosis, Cryptosporidiosis, Dientamoebiasis, Dourine, Ectoparasitic, Giardias, Helminthiasis, Leishmaniasis, Schistisoma, Theileriasis, Toxoplasmosis, Trypanosomiasis, and Trichomonas and Sporozoans (e.g., Plasmodium virax, Plasmodium falciparium, Plasmodium malariae and Plasmodium ovale). These parasites can cause a variety of diseases or symptoms, including, but not limited to: Scabies, Trombiculiasis, eye infections, intestinal disease (e.g., dysentery, giardiasis), liver disease, lung disease, opportunistic infections (e.g., AIDS related), malaria, pregnancy complications, and toxoplasmosis. Albumin fusion proteins of the invention and/or polynucleotides encoding albumin fusion proteins of the invention, can be used to treat, prevent, and/or diagnose any of these symptoms or diseases. In specific embodiments, fusion proteins of the invention and/or polynucleotides encoding albumin fusion proteins of the invention are used to treat, prevent, and/or diagnose malaria.

[0837] Albumin fusion proteins of the invention and/or polynucleotides encoding albumin fusion proteins of the invention could either be by administering an effective amount of an albumin fusion protein of the invnetion to the patient, or by removing cells from the patient, supplying the cells with a polynucleotide of the present invention, and returning the engineered cells to the patient (ex vivo therapy). Moreover, the albumin fusion proteins of the invention and/or polynucleotides encoding albumin fusion proteins of the invention can be used as an antigen in a vaccine to raise an immune response against infectious disease.

[0838] Regeneration

[0839] Albumin fusion proteins of the invention and/or polynucleotides encoding albumin fusion proteins of the invention can be used to differentiate, proliferate, and attract cells, leading to the regeneration of tissues. (See, Science 276:59-87 (1997)). The regeneration of tissues could be used to repair, replace, or protect tissue damaged by congenital defects, trauma (wounds, burns, incisions, or ulcers), age, disease (e.g. osteoporosis, osteocarthritis, periodontal disease, liver failure), surgery, including cosmetic plastic surgery, fibrosis, reperfusion injury, or systemic cytokine damage.

[0840] Tissues that could be regenerated using the present invention include organs (e.g., pancreas, liver, intestine, kidney, skin, endothelium), muscle (smooth, skeletal or cardiac), vasculature (including vascular and lymphatics), nervous, hematopoietic, and skeletal (bone, cartilage, tendon, and ligament) tissue. Preferably, regeneration occurs without or decreased scarring. Regeneration also may include angiogenesis.

[0841] Moreover, fusion proteins of the invention and/or polynucleotides encoding albumin fusion proteins of the invention, may increase regeneration of tissues difficult to heal. For example, increased tendon/ligament regeneration would quicken recovery time after damage. Albumin fusion proteins of the invention and/or polynucleotides encoding albumin fusion proteins of the invention could also be used prophylactically in an effort to avoid damage. Specific diseases that could be treated include of tendinitis, carpal tunnel syndrome, and other tendon or ligament defects. A further example of tissue regeneration of non-healing wounds includes pressure ulcers, ulcers associated with vascular insufficiency, surgical, and traumatic wounds.

[0842] Similarly, nerve and brain tissue could also be regenerated by using fusion proteins of the invention and/or polynucleotides encoding albumin fusion proteins of the invention, to proliferate and differentiate nerve cells. Diseases that could be treated using this method include central and peripheral nervous system diseases, neuropathies, or mechanical and traumatic disorders (e.g., spinal cord disorders, head trauma, cerebrovascular disease, and stoke). Specifically, diseases associated with peripheral nerve injuries, peripheral neuropathy (e.g., resulting from chemotherapy or other medical therapies), localized neuropathies, and central nervous system diseases (e.g., Alzheimer's disease, Parkinson's disease, Huntington's disease, amyotrophic lateral sclerosis, and Shy-Drager syndrome), could all be treated using the albumin fusion proteins of the invention and/or polynucleotides encoding albumin fusion proteins of the invention.

[0843] Gastrointestinal Disorders

[0844] Albumin fusion proteins of the invention and/or polynucleotides encoding albumin fusion proteins of the invention, may be used to treat, prevent, diagnose, and/or prognose gastrointestinal disorders, including inflammatory diseases and/or conditions, infections, cancers (e.g., intestinal neoplasms (carcinoid tumor of the small intestine, non-Hodgkin's lymphoma of the small intestine, small bowl lymphoma)), and ulcers, such as peptic ulcers.

[0845] Gastrointestinal disorders include dysphagia, odynophagia, inflammation of the esophagus, peptic esophagitis, gastric reflux, submucosal fibrosis and stricturing, Mallory-Weiss lesions, leiomyomas, lipomas, epidermal cancers, adeoncarcinomas, gastric retention disorders, gastroenteritis, gastric atrophy, gastric/stomach cancers, polyps of the stomach, autoimmune disorders such as pernicious anemia, pyloric stenosis, gastritis (bacterial, viral, eosinophilic, stress-induced, chronic erosive, atrophic, plasma cell, and Ménétrier's), and peritoneal diseases (e.g., chyloperioneum, hemoperitoneum, mesenteric cyst, mesenteric lymphadenitis, mesenteric vascular occlusion, panniculitis, neoplasms, peritonitis, pneumoperitoneum, bubphrenic abscess,).

[0846] Gastrointestinal disorders also include disorders associated with the small intestine, such as malabsorption syndromes, distension, irritable bowel syndrome, sugar intolerance, celiac disease, duodenal ulcers, duodenitis, tropical sprue, Whipple's disease, intestinal lymphangiectasia, Crohn's disease, appendicitis, obstructions of the ileum, Meckel's diverticulum, multiple diverticula, failure of complete rotation of the small and large intestine, lymphoma, and bacterial and parasitic diseases (such as Traveler's diarrhea, typhoid and paratyphoid, cholera, infection by Roundworms (Ascariasis lumbricoides), Hookworms (Ancylostoma duodenale), Threadworms (Enterobius vermicularis), Tapeworms (Taenia saginata, Echinococcus granulosus, Diphyllobothrium spp., and T. solium).

[0847] Liver diseases and/or disorders include intrahepatic cholestasis (alagille syndrome, biliary liver cirrhosis), fatty liver (alcoholic fatty liver, reye syndrome), hepatic vein thrombosis, hepatolentricular degeneration, hepatomegaly, hepatopulmonary syndrome, hepatorenal syndrome, portal hypertension (esophageal and gastric varices), liver abscess (amebic liver abscess), liver cirrhosis (alcoholic, biliary and experimental), alcoholic liver diseases (fatty liver, hepatitis, cirrhosis), parasitic (hepatic echinococcosis, fascioliasis, amebic liver abscess), jaundice (hemolytic, hepatocellular, and cholestatic), cholestasis, portal hypertension, liver enlargement, ascites, hepatitis (alcoholic hepatitis, animal hepatitis, chronic hepatitis (autoimmune, hepatitis B, hepatitis C, hepatitis D, drug induced), toxic hepatitis, viral human hepatitis (hepatitis A, hepatitis B, hepatitis C, hepatitis D, hepatitis E), Wilson's disease, granulomatous hepatitis, secondary biliary cirrhosis, hepatic encephalopathy, portal hypertension, varices, hepatic encephalopathy, primary biliary cirrhosis, primary sclerosing cholangitis, hepatocellular adenoma, hemangiomas, bile stones, liver failure (hepatic encephalopathy, acute liver failure), and.liver neoplasms (angiomyolipoma, calcified liver metastases, cystic liver metastases, epithelial tumors, fibrolamellar hepatocarcinoma, focal nodular hyperplasia, hepatic adenoma, hepatobiliary cystadenoma, hepatoblastoma, hepatoceliular carcinoma, hepatoma, liver cancer, liver hemangioendothelioma, mesenchymal hamartoma, mesenchymal tumors of liver, nodular regenerative hyperplasia, benign liver tumors (Hepatic cysts [Simple cysts, Polycystic liver disease, Hepatobiliary cystadenoma, Choledochal cyst], Mesenchymal tumors [Mesenchymal hamartoma, Infantile hemangioendothelioma, Hemangioma, Peliosis hepatis, Lipomas, Inflammatory pseudotumor, Miscellaneous], Epithelial tumors [Bile duct epithelium (Bile duct hamartoma, Bile duct adenoma), Hepatocyte (Adenoma, Focal nodular hyperplasia, Nodular regenerative hyperplasia)], malignant liver tumors [hepatocellular, hepatoblastoma, hepatocellular carcinoma, cholangiocellular, cholangiocarcinoma, cystadenocarcinoma, tumors of blood vessels, angiosarcoma, Karposi's sarcoma, hemangioendothelioma, other tumors, embryonal sarcoma, fibrosarcoma, leiomyosarcoma, rhabdomyosarcoma, carcinosarcoma, teratoma, carcinoid, squamous carcinoma, primary lymphoma]), peliosis hepatis, erythrohepatic porphyria, hepatic porphyria (acute intermittent porphyria, porphyria cutanea tarda), Zellweger syndrome).

[0848] Pancreatic diseases and/or disorders include acute pancreatitis, chronic pancreatitis (acute necrotizing pancreatitis, alcoholic pancreatitis), neoplasms (adenocarcinoma of the pancreas, cystadenocarcinoma, insulinoma, gastrinoma, and glucagonoma, cystic neoplasms, islet-cell tumors, pancreoblastoma), and other pancreatic diseases (e.g., cystic fibrosis, cyst (pancreatic pseudocyst, pancreatic fistula, insufficiency)).

[0849] Gallbladder diseases include gallstones (cholelithiasis and choledocholithiasis), postcholecystectomy syndrome, diverticulosis of the gallbladder, acute cholecystitis, chronic cholecystitis, bile duct tumors, and mucocele.

[0850] Diseases and/or disorders of the large intestine include antibiotic-associated colitis, diverticulitis, ulcerative colitis, acquired megacolon, abscesses, fungal and bacterial infections, anorectal disorders (e.g., fissures, hemorrhoids), colonic diseases (colitis, colonic neoplasms [colon cancer, adenomatous colon polyps (e.g., villous adenoma), colon carcinoma, colorectal cancer], colonic diverticulitis, colonic diverticulosis, megacolon [Hirschsprung disease, toxic megacolon]; sigmoid diseases [proctocolitis, sigmoin neoplasms]), constipation, Crohn's disease, diarrhea (infantile diarrhea, dysentery), duodenal diseases (duodenal neoplasms, duodenal obstruction, duodenal ulcer, duodenitis), enteritis (enterocolitis), HIV enteropathy, ileal diseases (ileal neoplasms, ileitis), immunoproliferative small intestinal disease, inflammatory bowel disease (ulcerative colitis, Crohn's disease), intestinal atresia, parasitic diseases (anisakiasis, balantidiasis, blastocystis infections, cryptosporidiosis, dientamoebiasis, amebic dysentery, giardiasis), intestinal fistula (rectal fistula), intestinal neoplasms (cecal neoplasms, colonic neoplasms, duodenal neoplasms, ileal neoplasms, intestinal polyps, jejunal neoplasms, rectal neoplasms), intestinal obstruction (afferent loop syndrome, duodenal obstruction, impacted feces, intestinal pseudo-obstruction [cecal volvulus], intussusception), intestinal perforation, intestinal polyps (colonic polyps, gardner syndrome, peutz-jeghers syndrome), jejunal diseases (jejunal neoplasms), malabsorption syndromes (blind loop syndrome, celiac disease, lactose intolerance, short bowl syndrome, tropical sprue, whipple's disease), mesenteric vascular occlusion, pneumatosis cystoides intestinalis, protein-losing enteropathies (intestinal lymphagiectasis), rectal diseases (anus diseases, fecal incontinence, hemorrhoids, proctitis, rectal fistula, rectal prolapse, rectocele), peptic ulcer (duodenal ulcer, peptic esophagitis, hemorrhage, perforation, stomach ulcer, Zollinger-Ellison syndrome), postgastrectomy syndromes (dumping syndrome), stomach diseases (e.g., achlorhydria, duodenogastric reflux (bile reflux), gastric antral vascular ectasia, gastric fistula, gastric outlet obstruction, gastritis (atrophic or hypertrophic), gastroparesis, stomach dilatation, stomach diverticulum, stomach neoplasms (gastric cancer, gastric polyps, gastric adenocarcinoma, hyperplastic gastric polyp), stomach rupture, stomach ulcer, stomach volvulus), tuberculosis, visceroptosis, vomiting (e.g., hematemesis, hyperemesis gravidarum, postoperative nausea and vomiting) and hemorrhagic colitis.

[0851] Further diseases and/or disorders of the gastrointestinal system include biliary tract diseases, such as, gastroschisis, fistula (e.g., biliary fistula, esophageal fistula, gastric fistula, intestinal fistula, pancreatic fistula), neoplasms (e.g., biliary tract neoplasms, esophageal neoplasms, such as adenocarcinoma of the esophagus, esophageal squamous cell carcinoma, gastrointestinal neoplasms, pancreatic neoplasms, such as adenocarcinoma of the pancreas, mucinous cystic neoplasm of the pancreas, pancreatic cystic neoplasms, pancreatoblastoma, and peritoneal neoplasms), esophageal disease (e.g., bullous diseases, candidiasis, glycogenic acanthosis, ulceration, barren esophagus varices, atresia, cyst, diverticulum (e.g., Zenker's diverticulum), fistula (e.g., tracheoesophageal fistula), motility disorders (e.g., CREST syndrome, deglutition disorders, achalasia, spasm, gastroesophageal reflux), neoplasms, perforation (e.g., Boerhaave syndrome, Mallory-Weiss syndrome), stenosis, esophagitis, diaphragmatic hernia (e.g., hiatal hernia); gastrointestinal diseases, such as, gastroenteritis (e.g., cholera morbus, norwalk virus infection), hemorrhage (e.g., hematemesis, melena, peptic ulcer hemorrhage), stomach neoplasms (gastric cancer, gastric polyps, gastric adenocarcinoma, stomach cancer)), hernia (e.g., congenital diaphragmatic hernia, femoral hernia, inguinal hernia, obturator hernia, umbilical hernia, ventral hernia), and intestinal diseases (e.g., cecal diseases (appendicitis, cecal neoplasms)).

[0852] Chemotaxis

[0853] Albumin fusion proteins of the invention and/or polynucleotides encoding albumin fusion proteins of the invention may have chemotaxis activity. A chemotaxic molecule atracts or mobilizes cells (e.g., monocytes, fibroblasts, neutrophils, T-cells, mast cells, eosinophils, epithelial and/or endothelial cells) to a particular site in the body, such as inflammation, infection, or site of hyperproliferation. The mobilized cells can then fight off and/or heal the particular trauma or abnormality.

[0854] Albumin fusion proteins of the invention and/or polynucleotides encoding albumin fusion proteins of the invention may increase chemotaxic activity of particular cells. These chemotactic molecules can then be used to treat inflammation, infection, hyperproliferative disorders, or any immune system disorder by increasing the number of cells targeted to a particular location in the body. For example, chemotaxic molecules can be used to treat wounds and other trauma to tissues by atracting immune cells to the injured location. Chemotactic molecules of the present invention can also attract fibroblasts, which can be used to treat wounds.

[0855] It is also contemplated that fusion proteins of the invention and/or polynucleotides encoding albumin fusion proteins of the invention may inhibit chemotactic activity. These molecules could also be used to treat disorders. Thus, fusion proteins of the invention and/or polynucleotides encoding albumin fusion proteins of the invention could be used as an inhibitor of chemotaxis.

[0856] Binding Activity

[0857] Albumin fusion proteins of the invention may be used to screen for molecules that bind to the Therapeutic protein portion of the fusion protein or for molecules to which the Therapeutic protein portion of the fusion protein binds. The binding of the fusion protein and the molecule may activate (agonist), increase, inhibit (antagonist), or decrease activity of the fusion protein or the molecule bound. Examples of such molecules include antibodies, oligonucleotides, proteins (e.g., receptors), or small molecules.

[0858] Preferably, the molecule is closely related to the natural ligand of the Therapeutic protein portion of the fusion protein of the invention, e.g., a fragment of the ligand, or a natural substrate, a ligand, a structural or functional mimetic. (See, Coligan et al., Current Protocols in Immunology 1(2):Chapter 5 (1991)). Similarly, the molecule can be closely related to the natural receptor to which the Therapeutic protein portion of an albumin fusion protein of the invention binds, or at least, a fragment of the receptor capable of being bound by the Therapeutic protein portion of an albumin fusion protein of the invention (e.g., active site). In either case, the molecule can be rationally designed using known techniques.

[0859] Preferably, the screening for these molecules involves producing appropriate cells which express the albumin fusion proteins of the invention. Preferred cells include cells from mammals, yeast, Drosophila, or E. coli.

[0860] The assay may simply test binding of a candidate compound to an albumin fusion protein of the invention, wherein binding is detected by a label, or in an assay involving competition with a labeled competitor. Further, the assay may test whether the candidate compound results in a signal generated by binding to the fusion protein.

[0861] Alternatively, the assay can be carried out using cell-free preparations, fusion protein/molecule affixed to a solid support, chemical libraries, or natural product mixtures. The assay may also simply comprise the steps of mixing a candidate compound with a solution containing an albumin fusion protein, measuring fusion protein/molecule activity or binding, and comparing the fusion protein/molecule activity or binding to a standard.

[0862] Preferably, an ELISA assay can measure fusion protein level or activity in a sample (e.g., biological sample) using a monoclonal or polyclonal antibody. The antibody can measure fusion protein level or activity by either binding, directly or indirectly, to the albumin fusion protein or by competing with the albumin fusion protein for a substrate.

[0863] Additionally, the receptor to which a Therapeutic protein portion of an albumin fusion protein of the invention binds can be identified by numerous methods known to those of skill in the art, for example, ligand panning and FACS sorting (Coligan, et al., Current Protocols in Immun., 1(2), Chapter 5, (1991)). For example, in cases wherein the Therapeutic protein portion of the fusion protein corresponds to FGF, expression cloning may be employed wherein polyadenylated RNA is prepared from a cell responsive to the albumin fusion protein, for example, NIH3T3 cells which are known to contain multiple receptors for the FGF family proteins, and SC-3 cells, and a cDNA library created from this RNA is divided into pools and used to transfect COS cells or other cells that are not responsive to the albumin fusion protein. Transfected cells which are grown on glass slides are exposed to the albumin fusion protein of the present invention, after they have been labeled. The albumin fusion proteins can be labeled by a variety of means including iodination or inclusion of a recognition site for a site-specific protein kinase.

[0864] Following fixation and incubation, the slides are subjected to auto-radiographic analysis. Positive pools are identified and sub-pools are prepared and re-transfected using an iterative sub-pooling and re-screening process, eventually yielding a single clones that encodes the putative receptor.

[0865] As an altemative approach for receptor identification, a labeled albumin fusion protein can be photoaffinity linked with cell membrane or extract preparations that express the receptor molecule for the Therapeutoc protein component of an albumin fusion protein of the invention, the linked material may be resolved by PAGE analysis and exposed to X-ray film. The labeled complex containing the receptors of the fusion protein can be excised, resolved into peptide fragments, and subjected to protein microsequencing. The amino acid sequence obtained from microsequencing would be used to design a set of degenerate oligonucleotide probes to screen a cDNA library to identify the genes encoding the putative receptors.

[0866] Moreover, the techniques of gene-shuffling, motif-shuffling, exon-shuffling, and/or codon-shuffling (collectively referred to as “DNA shuffling”) may be employed to modulate the activities of the fusion protein, and/or Therapeutic protein portion or albumin component of an albumin fusion protein of the present invention, thereby effectively generating agonists and antagonists of an albumin fusion protein of the present invention. See generally, U.S. Pat. Nos. 5,605,793, 5,811,238, 5,830,721, 5,834,252, and 5,837,458, and Patten, P. A., et al., Curr. Opinion Biorechnol. 8:724-33 (1997); Harayama, S. Trends Biotechnol. 16(2):76-82 (1998); Hansson, L. O., et al., J. Mol. Biol. 287:265-76 (1999); and Lorenzo, M. M. and Blasco, R. Biotechniques 24(2):308-13 (1998); each of these patents and publications are hereby incorporated by reference). In one embodiment, alteration of polynucleotides encoding albumin fusion proteins of the invention and thus, the albumin fusion proteins encoded thereby, may be achieved by DNA shuffling. DNA shuffling involves the assembly of two or more DNA segments into a desired molecule by homologous, or site-specific, recombination. In another embodiment, polynucleotides encoding albumin fusion proteins of the invention and thus, the albumin fusion proteins encoded thereby, may be altered by being subjected to random mutagenesis by error-prone PCR, random nucleotide insertion or other methods prior to recombination. In another embodiment, one or more components, motifs, sections, parts, domains, fragments, etc., of an albumin fusion protein of the present invention may be recombined with one or more components, motifs, sections, parts, domains, fragments, etc. of one or more heterologous molecules. In preferred embodiments, the heterologous molecules are family members. In further preferred embodiments, the heterologous molecule is a growth factor such as, for example, platelet-derived growth factor (PDGF), insulin-like growth factor (IGF-l), transforming growth factor (TGF)-alpha, epidermal growth factor (EGF), fibroblast growth factor (FGF), TGF-beta, bone morphogenetic protein (BMP)-2, BMP-4, BMP-5, BMP-6, BMP-7, activins A and B, decapentaplegic(dpp), 60A, OP-2, dorsalin, growth differentiation factors (GDFs), nodal, MIS, inhibin-alpha, TGF-beta1, TGF-beta2, TGF-beta3, TGF-beta5, and glial-derived neurotrophic factor (GDNF).

[0867] Other preferred fragments are biologically active fragments of the Therapeutic protein portion and/or albumin component of the albumin fusion proteins of the present invention. Biologically active fragments are those exhibiting activity similar, but not necessarily identical, to an activity of a Therapeutic protein portion and/or albumin component of the albumin fusion proteins of the present invention. The biological activity of the fragments may include an improved desired activity, or a decreased undesirable activity.

[0868] Additionally, this invention provides a method of screening compounds to identify those which modulate the action of an albumin fusion protein of the present invention. An example of such an assay comprises combining a mammalian fibroblast cell, an albumin fusion protein of the present invention, and the compound to be screened and ³[H] thymidine under cell culture conditions where the fibroblast cell would normally proliferate. A control assay may be performed in the absence of the compound to be screened and compared to the amount of fibroblast proliferation in the presence of the compound to determine if the compound stimulates proliferation by determining the uptake of ³[H] thymidine in each case. The amount of fibroblast cell proliferation is measured by liquid scintillation chromatography which measures the incorporation of ³[H] thymidine. Both agonist and antagonist compounds may be identified by this procedure.

[0869] In another method, a mammalian cell or membrane preparation expressing a receptor for the Therapeutic protien component of a fusion protine of the invention is incubated with a labeled fusion protein of the present invention in the presence of the compound. The ability of the compound to enhance or block this interaction could then be measured. Alternatively, the response of a known second messenger system following interaction of a compound to be screened and the receptor is measured and the ability of the compound to bind to the receptor and elicit a second messenger response is measured to determine if the compound is a potential fusion protein. Such second messenger systems include but are not limited to, cAMP guanylate cyclase, ion channels or phosphoinositide hydrolysis.

[0870] All of these above assays can be used as diagnostic or prognostic markers. The molecules discovered using these assays can be used to treat disease or to bring about a particular result in a patient (e.g., blood vessel growth) by activating or inhibiting the fusion protein/molecule. Moreover, the assays can discover agents which may inhibit or enhance the production of the albumin fusion proteins of the invention from suitably manipulated cells or tissues.

[0871] Therefore, the invention includes a method of identifying compounds which bind to an albumin fusion protein of the invention comprising the steps of: (a) incubating a candidate binding compound with an albumin fusion protein of the present invention; and (b) determining if binding has occurred. Moreover, the invention includes a method of identifying agonists/antagonists comprising the steps of: (a) incubating a candidate compound with an albumin fusion protein of the present invention, (b) assaying a biological activity, and (b) determining if a biological activity of the fusion protein has been altered.

[0872] Targeted Delivery

[0873] In another embodiment, the invention provides a method of delivering compositions to targeted cells expressing a receptor for a component of an albumin fusion protein of the invention.

[0874] As discussed herein, fusion proteins of the invention may be associated with heterologous polypeptides, heterologous nucleic acids; toxins, or prodrugs via hydrophobic, hydrophilic, ionic and/or covalent interactions. In one embodiment, the invention provides a method for the specific delivery of compositions of the invention to cells by administering fusion proteins of the invention (including antibodies) that are associated with heterologous polypeptides or nucleic acids. In one example, the invention provides a method for delivering a Therapeutic protein into the targeted cell. In another example, the invention provides a method for delivering a single stranded nucleic acid (e.g., antisense or ribozymes) or double stranded nucleic acid (e.g., DNA that can integrate into the cell's genome or replicate episomally and that can be transcribed) into the targeted cell.

[0875] In another embodiment, the invention provides a method for the specific destruction of cells (e.g., the destruction of tumor cells) by administering an albumin fusion protein of the invention (e.g., polypeptides of the invention or antibodies of the invention) in association with toxins or cytotoxic prodrugs.

[0876] By “toxin” is meant compounds that bind and activate endogenous cytotoxic effector systems, radioisotopes, holotoxins, modified toxins, catalytic subunits of toxins, or any molecules or enzymes not normally present in or on the surface of a cell that under defined conditions cause the cell's death. Toxins that may be used according to the methods of the invention include, but are not limited to, radioisotopes known in the art, compounds such as, for example, antibodies (or complement fixing containing portions thereof) that bind an inherent or induced endogenous cytotoxic effector system, thymidine kinase, endonuclease, RNAse, alpha toxin, ricin, abrin, Pseudomonas exotoxin A, diphtheria toxin, saporin, momordin, gelonin, pokeweed antiviral protein, alpha-sarcin and cholera toxin. By “cytotoxic prodrug” is meant a non-toxic compound that is converted by an enzyme, normally present in the cell, into a cytotoxic compound. Cytotoxic prodrugs that may be used according to the methods of the invention include, but are not limited to, glutamyl derivatives of benzoic acid mustard alkylating agent, phosphate derivatives of etoposide or mitomycin C, cytosine arabinoside, daunorubisin, and phenoxyacetamide derivatives of doxorubicin.

[0877] Drug Screening

[0878] Further contemplated is the use of the albumin fusion proteins of the present invention, or the polynucleotides encoding these fusion proteins, to screen for molecules which modify the activities of the albumin fusion protein of the present invention or proteins corresponding to the Therapeutic protein portion of the albumin fusion protein. Such a method would include contacting the fusion protein with a selected compound(s) suspected of having antagonist or agonist activity, and assaying the activity of the fusion protein following binding.

[0879] This invention is particularly useful for screening therapeutic compounds by using the albumin fusion proteins of the present invention, or binding fragments thereof, in any of a variety of drug screening techniques. The albumin fusion protein employed in such a test may be affixed to a solid support, expressed on a cell surface, free in solution, or located intracelularly. One method of drug screening utilizes eukaryotic or prokaryotic host cells which are stably transformed with recombinant nucleic acids expressing the albumin fusion protein. Drugs are screened against such transformed cells or supernatants obtained from culturing such ceus, in competitive binding assays. One may measure, for example, the formulation of complexes between the agent being tested and an albumin fusion protein of the present invention.

[0880] Thus, the present invention provides methods of screening for drugs or any other agents which affect activities mediated by the albumin fusion proteins of the present invention. These methods comprise contacting such an agent with an albumin fusion protein of the present invention or a fragment thereof and assaying for the presence of a complex between the agent and the albumin fusion protein or a fragment thereof, by methods well known in the art. In such a competitive binding assay, the agents to screen are typically labeled. Following incubation, free agent is separated from that present in bound form, and the amount of free or uncomplexed label is a measure of the ability of a particular agent to bind to the albumin fusion protein of the present invention.

[0881] Another technique for drug screening provides high throughput screening for compounds having suitable binding affinity to an albumin fusion protein of the present invention, and is described in great detail in European Patent Application 84/03564, published on Sep. 13, 1984, which is incorporated herein by reference herein. Briefly stated, large numbers of different small peptide test compounds are synthesized on a solid substrate, such as plastic pins or some other surface. The peptide test compounds are reacted with an albumin fusion protein of the present invention and washed. Bound peptides are then detected by methods well known in the art. Purified albumin fusion protein may be coated directly onto plates for use in the aforementioned drug screening techniques. In addition, non-neutralizing antibodies may be used to capture the peptide and immobilize it on the solid support.

[0882] This invention also contemplates the use of competitive drug screening assays in which neutralizing antibodies capable of binding an albumin fusion protein of the present invention specifically compete with a test compound for binding to the albumin fusion protein or fragments thereof. In this manner, the antibodies are used to detect the presence of any peptide which shares one or more antigenic epitopes with an albumin fusion protein of the invention.

[0883] Binding Peptides and Other Molecules

[0884] The invention also encompasses screening methods for identifying polypeptides and nonpolypeptides that bind albumin fusion proteins of the invention, and the binding molecules identified thereby. These binding molecules are useful, for example, as agonists and antagonists of the albumin fusion proteins of the invention. Such agonists and antagonists can be used, in accordance with the invention, in the therapeutic embodiments described in detail, below.

[0885] This method comprises the steps of: contacting an albumin fusion protein of the invention with a plurality of molecules; and identifying a molecule that binds the albumin fusion protein.

[0886] The step of contacting the albumin fusion protein of the invention with the plurality of molecules may be effected in a number of ways. For example, one may contemplate immobilizing the albumin fusion protein on a solid support and bringing a solution of the plurality of molecules in contact with the immobilized polypeptides. Such a procedure would be akin to an affinity chromatographic process, with the affinity matrix being comprised of the immobilized albumin fusion protein of the invention. The molecules having a selective affinity for the albumin fusion protein can then be purified by affinity selection. The nature of the solid support, process for attachment of the albumin fusion protein to the solid support, solvent, and conditions of the affinity isolation or selection are largely conventional and well known to those of ordinary skill in the art.

[0887] Alternatively, one may also separate a plurality of polypeptides into substantially separate fractions comprising a subset of or individual polypeptides. For instance, one can separate the plurality of polypeptides by gel electrophoresis, column chromatography, or like method known to those of ordinary skill for the separation of polypeptides. The individual polypeptides can also be produced by a transformed host cell in such a way as to be expressed on or about its outer surface (e.g., a recombinant phage). Individual isolates can then be “probed” by an albumin fusion protein of the invention, optionally in the presence of an inducer should one be required for expression, to determine if any selective affinity interaction takes place between the albumin fusion protein and the individual clone. Prior to contacting the albumin fusion protein with each fraction comprising individual polypeptides, the polypeptides could first be transferred to a solid support for additional convenience. Such a solid support may simply be a piece of filter membrane, such as one made of nitrocellulose or nylon. In this manner, positive clones could be identified from a collection of transformed host cells of an expression library, which harbor a DNA construct encoding a polypeptide having a selective affinity for an albumin fusion protein of the invention. Furthermore, the amino acid sequence of the polypeptide having a selective affinity for an albumin fusion protein of the invention can be determined directly by conventional means or the coding sequence of the DNA encoding the polypeptide can frequently be determined more conveniently. The primary sequence can then be deduced from the corresponding DNA sequence. If the amino acid sequence is to be determined from the polypeptide itself, one may use microsequencing techniques. The sequencing technique may include mass spectroscopy.

[0888] In certain situations, it may be desirable to wash away any unbound polypeptides from a mixture of an albumin fusion protein of the invention and the plurality of polypeptides prior to attempting to determine or to detect the presence of a selective affinity interaction. Such a wash step may be particularly desirable when the albumin fusion protein of the invention or the plurality of polypeptides are bound to a solid support.

[0889] The plurality of molecules provided according to this method may be provided by way of diversity libraries, such as random or combinatorial peptide or nonpeptide libraries which can be screened for molecules that specifically bind an albumin fusion protein of the invention. Many libraries are known in the art that can be used, e.g., chemically synthesized libraries, recombinant (e.g., phage display libraries), and in vitro translation-based libraries. Examples of chemically synthesized libraries are described in Fodor et al., Science 251:767-773 (1991); Houghten et al., Nature 354:84-86 (1991); Lam et al., Nature 354:82-84 (1991); Medynski, Bio/Technology 12:709-710 (1994); Gallop et al., J. Medicinal Chemistry 37(9): 1233-1251 (1994); Ohlmeyer et al., Proc. Natl. Acad. Sci. USA 90:10922-10926 (1993); Erb et al., Proc. Natl. Acad. Sci. USA 91:11422-11426 (1994); Houghten et al., Biotechniques 13:412 (1992); Jayawickreme et al., Proc. Natl. Acad. Sci. USA 91:1614-1618 (1994); Salmon et al., Proc. Natl. Acad. Sci. USA 90:11708-11712 (1993); PCT Publication No. WO 93/20242; and Brenner and Lerner, Proc. Natl. Acad. Sci. USA 89:5381-5383 (1992).

[0890] Examples of phage display libraries are described in Scott et al., Science 249:386-390 (1990); Devlin et al., Science, 249:404-406 (1990); Christian et al., 1992, J. Mol. Biol. 227:711-718 1992); Lenstra, J. Immunol. Meth. 152:149-157 (1992); Kay et al., Gene 128:59-65 (1993); and PCT Publication No. WO 94/18318 dated Aug. 18, 1994.

[0891] In vitro translation-based libraries include but are not limited to those described in PCT Publication No. WO 91/05058 dated Apr. 18, 1991; and Mattheakis et al., Proc. Natl. Acad. Sci. USA 91:9022-9026 (1994).

[0892] By way of examples of nonpeptide libraries, a benzodiazepine library (see e.g., Bunin et al., Proc. Natl. Acad. Sci. USA 91:4708-4712 (1994)) can be adapted for use. Peptoid libraries (Simon et al., Proc. Natl. Acad. Sci. USA 89:9367-9371 (1992) can also be used. Another example of a library that can be used, in which the amide functionalities in peptides have been permethylated to generate a chemically transformed combinatorial library, is described by Ostresh et al. (Proc. Natl. Acad. Sci. USA 91:11138-11142 (1994)).

[0893] The variety of non-peptide libraries that are useful in the present invention is great. For example, Ecker and Crooke (Bio/Technology 13:351-360 (1995) list benzodiazepines, hydantoins, piperazinediones, biphenyls, sugar analogs, beta-mercaptoketones, arylacetic acids, acylpiperidines, benzopyrans, cubanes, xanthines, aminimides, and oxazolones as among the chemical species that form the basis of various libraries.

[0894] Non-peptide libraries can be classified broadly into two types: decorated monomers and oligomers. Decorated monomer libraries employ a relatively simple scaffold structure upon which a variety functional groups is added. Often the scaffold will be a molecule with a known useful pharmacological activity. For example, the scaffold might be the benzodiazepine structure.

[0895] Non-peptide oligomer libraries utilize a large number of monomers that are assembled together in ways that create new shape depend on the order of the monomers. Among the monomer units that have been used are carbamates, pyrrolinones, and morpholinos. Peptoids, peptide-like oligomers in which the side chain is attached to the alpha amino group rather than the alpha carbon, form the basis of another version of non-peptide oligomer libraries. The fust non-peptide oligomer libraries utilized a single type of monomer and thus contained a repeating backbone. Recent libraries have utilized more than one monomer, giving the libraries added flexibility.

[0896] Screening the libraries can be accomplished by any of a variety of commonly known methods. See, e.g., the following references, which disclose screening of peptide libraries: Parmley et al., Adv. Exp. Med. Biol. 251:215-218 (1989); Scott et al,. Science 249:386-390 (1990); Fowtkes et al., BioTechniques 13:422427 (1992); Oldenburg et al., Proc. Natl. Acad. Sci. USA 89:5393-5397 (1992); Yu et al., Cell 76:933-945 (1994); Staudt et al., Science 241:577-580 (1988); Bock et al., Nature 355:564-566 (1992); Tuerk et al., Proc. Natl. Acad. Sci. USA 89:6988-6992 (1992); Ellington et al., Nature 355:850-852 (1992); U.S. Pat. No. 5,096,815, U.S. Pat. No. 5,223,409, and U.S. Pat. No. 5,198,346, all to Ladner et al.; Rebar et al., Science 263:671-673 (1993); and PCT Publication No. WO 94/18318.

[0897] In a specific embodiment, screening to identify a molecule that binds an albumin fusion protein of the invention can be carried out by contacting the library-members with an albumin fusion protein of the invention immobilized on a solid phase and harvesting those library members that bind to the albumin.fusion protein. Examples of such screening methods, termed “panning” techniques are described by way of example in Parmley et al., Gene 73:305-318 (1988); Fowikes et al., BioTechniques 13:422427 (1992); PCT Publication No. WO 94/18318; and in references cited herein.

[0898] In another embodiment, the two-hybrid system for selecting interacting proteins in yeast (Fields et al., Nature 340:245-246 (1989); Chien et al., Proc. Natl. Acad. Sci. USA 88:9578-9582 (1991) can be used to identify molecules that specifically bind to polypeptides of the invention.

[0899] Where the binding molecule is a polypeptide, the polypeptide can be conveniently selected from any peptide library, including random peptide libraries, combinatorial peptide libraries, or biased peptide libraries. The term “biased” is used herein to mean that the method of generating the library is manipulated so as to restrict one or more parameters that govem the diversity of the resulting collection of molecules, in this case peptides.

[0900] Thus, a truly random peptide library would generate a collection of peptides in which the probability of finding a particular amino acid at a given position of the peptide is the same for all 20 amino acids. A bias can be introduced into the library, however, by specifying, for example, that a lysine occur every fifth amino acid or that positions 4, 8, and 9 of a decapeptide library be fixed to include only arginine. Clearly, many types of biases can be contemplated, and the present invention is not restricted to any particular bias. Furthermore, the present invention contemplates specific types of peptide libraries, such as phage displayed peptide libraries and those that utilize a DNA construct comprising a lambda phage vector with a DNA insert.

[0901] As mentioned above, in the case of a binding molecule that is a polypeptide, the polypeptide may have about 6 to less than about 60 amino acid residues, preferably about 6 to about 10 amino acid residues, and most preferably, about 6 to about 22 amino acids. In another embodiment, a binding polypeptide has in the range of 15-100 amino acids, or 20-50 amino acids.

[0902] The selected binding polypeptide can be obtained by chemical synthesis or recombinant expression.

[0903] Other Activities

[0904] An albumin fusion protein of the invention and/or polynucleotide encoding an albumin fusion protein of the invention, may be employed in treatment for stimulating re-vascularization of ischemic tissues due to various disease conditions such as thrombosis, arteriosclerosis, and other cardiovascular conditions. The albumin fusion proteins of the invention and/or polynucleotides encoding albumin fusion proteins of the invention may also be employed to stimulate angiogenesis and limb regeneration, as discussed above.

[0905] An albumin fusion protein of the invention and/or polynucleotide encoding an albumin fusion protein of the invention may also be employed for treating wounds due to injuries, burns, post-operative tissue repair, and ulcers since they are mitogenic to various cells of different origins, such as fibroblast cells and skeletal muscle cells, and therefore, facilitate the repair or replacement of damaged or diseased tissue.

[0906] An albumin fusion protein of the invention and/or polynucleotide encoding an albumin fusion protein of the invention may also be employed stimulate neuronal growth and to treat and prevent neuronal damage which occurs in certain neuronal disorders or neuro-degenerative conditions such as Alzheimer's disease, Parkinson's disease, and AlDS-related complex. An albumin fusion protein of the invention and/or polynucleotide encoding an albumin fusion protein of the invention may have the ability to stimulate chondrocyte growth, therefore, they may be employed to enhance bone and periodontal regeneration and aid in tissue transplants or bone grafts.

[0907] An albumin fusion protein of the invention and/or polynucleotide encoding an albumin fusion protein of the invention may be also be employed to prevent skin aging due to sunburn by stimulating keratinocyte growth.

[0908] An albumin fusion protein of the invention and/or polynucleotide encoding an albumin fusion protein of the invention may also be employed for preventing hair loss, since FGF family members activate hair-forming cells and promotes melanocyte growth. Along the same lines, an albumin fusion protein of the invention and/or polynucleotide encoding an albumin fusion protein of the invention may be employed to stimulate growth and differentiation of hematopoietic cells and bone marrow cells when used in combination with other cytokines.

[0909] An albumin fusion protein of the invention and/or polynucleotide encoding an albumin fusion protein of the invention may also be employed to maintain organs before transplantation or for supporting cell culture of primary tissues. An albumin fusion protein of the invention and/or polynucleotide encoding an albumin fusion protein of the invention may also be employed for inducing tissue of mesodermal origin to differentiate in early embryos.

[0910] An albumin fusion protein of the invention and/or polynucleotide encoding an albumin fusion protein of the invention may also increase or decrease the differentiation or proliferation of embryonic stem cells, besides, as discussed above, hematopoietic lineage.

[0911] An albumin fusion protein of the invention and/or polynucleotide encoding an albumin fusion protein of the invention may also be used to modulate mammalian characteristics, such as body height, weight, hair color, eye color, skin, percentage of adipose tissue, pigmentation, size, and shape (e.g., cosmetic surgery). Similarly, an albumin fusion protein of the invention and/or polynucleotide encoding an albumin fusion protein of the invention may be used to modulate mammalian metabolism affecting catabolism, anabolism, processing, utilization, and storage of energy.

[0912] An albumin fusion protein of the invention and/or polynucleotide encoding an albumin fusion protein of the invention may be used to change a mammal's mental state or physical state by influencing biorhythms, caricadic rhythms, depression (including depressive disorders), tendency for violence, tolerance for pain, reproductive capabilities (preferably by Activin or Inhibin-like activity), hormonal or endocrine levels, appetite, libido, memory, stress, or other cognitive qualities.

[0913] An albumin fusion protein of the invention and/or polynucleotide encoding an albumin fusion protein of the invention may also be used as a food additive or preservative, such as to increase or decrease storage capabilities, fat content, lipid, protein, carbohydrate, vitamins, minerals, cofactors or other nutritional components.

[0914] The above-recited applications have uses in a wide variety of hosts. Such hosts include, but are not limited to, human, murine, rabbit, goat, guinea pig, camel, horse, mouse, rat, hamster, pig, micro-pig, chicken, goat, cow, sheep, dog, cat, non-human primate, and human. In specific embodiments, the host is a mouse, rabbit, goat, guinea pig, chicken, rat, hamster, pig, sheep, dog or cat. In preferred embodiments, the host is a mammal. In most preferred embodiments, the host is a human.

[0915] Having generally described the invention, the same will be more readily understood by reference to the following examples, which are provided by way of illustration and are not intended as limiting.

[0916] Without further description, it is believed that one of ordinary skill in the art can, using the preceding description and following illustrative examples, make and utilize the alterations detected in the present invention and practice the claimed methods. The following working examples therefore, specifically point out preferred embodiments of the present invention, and are not to be construed as limiting in any way the remainder of the disclosure.

### EXAMPLES

### Example 1

### Preparation of HA-hGH Fusion Proteins

[0917] An HA-hGH fusion protein was prepared as follows:

[0918] Cloning of hGH cDNA

[0919] The hGH cDNA was obtained from a human pituitary gland cDNA library (catalogue number HL1097v, Clontech Laboratories, Inc) by PCR amplification. Two oligonucleotides suitable for PCR amplification of the hGH cDNA, HGH1 and HGH2, were synthesized using an Applied Biosystems 380B Oligonucleotide Synthesizer.

(SEQ ID NO: 1)

| | |
|---|---|
| HGH1: | 5′- CCCAAGAATTCCCTTATCCAGGC -3′ |

(SEQ ID NO: 2)

| | |
|---|---|
| HGH2: | 5′- GGGAAGCTTAGAAGCCACAGGATCCCTCCACAG -3′ |

[0920] HGH1 and HGH2 differed from the equivalent portion of the hGH cDNA sequence (Martial et. al., 1979) by two and three nucleotides, respectively, such that after PCR amplification an EcoRI site would be introduced to the 5′ end of the cDNA and a BamH1 site would be introduced into the 3′ end of the cDNA. In addition, HGH2 contained a HindIII site immediately downstream of the hGH sequence.

[0921] PCR amplification using a Perkin-Elmer-Cetus Thermal Cycler 9600 and a Perkin-Elmer-Cetus PCR kit, was performed using single-stranded DNA template isolated from the phage particles of the cDNA library as follows: 10 μL phage particles were lysed by the addition of 10 μL phage lysis buffer (280 μg/mL proteinase K in TE buffer) and incubation at 55° C. for 15 min followed by 85° C. for 15 min. After a 1 min. incubation on ice, phage debris was pelleted by centrifugation at 14,000 rpm for 3 min. The PCR mixture contained 6 μL of this DNA template, 0.1 μM of each primer and 200 μM of each deoxyribonucleotide. PCR was carried out for 30 cycles, denaturing at 94° C. for 30 s, annealing at 65° C. for 30 s and extending at 72° C. for 30 s, increasing the extension time by 1 s per cycle.

[0922] Analysis of the reaction by gel electrophoresis showed a single product of the expected size (589 base pairs).

[0923] The PCR product was purified using Wizard PCR Preps DNA Purification System (Promega Corp) and then digested with EcoRI and HindIII. After further purification of the EcoRI-HindIII fragment by gel electrophoresis, the product was cloned into pUC19 (GIBCO BRL) digested with EcoRI and HindIII, to give pHGH1. DNA sequencing of the EcoRI HindIII region showed that the PCR product was identical in sequence to the hGH sequence (Martial et al., 1979), except at the 5′ and 3′ ends, where the EcoRI and BamHI sites had been introduced, respectively.

[0924] Expression of the hGH cDNA.

[0925] The polylinker sequence of the phagemid pBluescribe (+) (Stratagene) was replaced by inserting an oligonucleotide linker, formed by annealing two 75-mer oligonucleotides, between the EcoRI and HindIII sites to form pBST(+). The new polylinker included a unique NotI site.

[0926] The NotI HA expression cassette of pAYE309 (EP 431 880) comprising the PRBI promoter, DNA encoding the HA/MF□-I hybrid leader sequence, DNA encoding HA and the ADH1 terminator, was transferred to pBST(+) to form pHA1. The HA coding sequence was removed from this plasmid by digestion with HindIII followed by religation to form pHA2.

[0927] Cloning of the hGH cDNA, as described in Example 1, provided the hGH coding region lacking the pro-hGH sequence and the fuist 8 base pairs (bp) of the mature hGH sequence. In order to construct an expression plasmid for secretion of hGH from yeast, a yeast promoter, signal peptide and the first 8 bp of the hGH sequence were attached to the 5′ end of the cloned hGH sequence as follows: The HindIII-SfaNI fragment from pHA 1 was attached to the 5′ end of the EcoRI/HindIII fragment from pHGHI via two synthetic oligonucleotides, HGH3 and HGH4 (which can anneal to one another in such a way as to generate a double stranded fragment of DNA with sticky ends that can anneal with SfaNI and EcoRI sticky ends):

| | | |
|---|---|---|
| HGH3: | 5′-GATAAAGATTCCCAAC -3′ | (SEQ ID NO: 3) |
| HGH4: | 5′-AATTGTTGGGAATCTTT- 3′ | (SEQ ID NO: 4) |

[0928] The HindIII fragment so formed was cloned into HindIII-digested pHA2 to make pHGH2, such that the hGH cDNA was positioned downstream of the PRBI promoter and HA/MF□-1 fusion leader sequence (WO 90/01063). The Notl expression cassette contained in pHGH2, which included the ADH1 terminator downstream of the hGH cDNA, was cloned into NotI-digested pSAC35 (Sleep et al., BioTechnology 8:42 (1990)) to make pHGH12. This plasmid comprised the entire 2 μm plasmid to provide replication functions and the LEU2 gene for selection of transformants.

[0929] pHGH12 was introduced into S. cerevisiae D88 by transformation and individual transformants were grown for 3 days at 30° C. in 10 mL YEPD (1% w/v yeast extract, 2% w/v, peptone, 2% w/v, dextrose).

[0930] After centrifugation of the cells, the supernatants were examined by SDS-polyacrylamide gel electrophoresis (SDS-PAGE) and were found to contain protein which was of the expected size and which was recognized by anti-hGH antiserum (Sigma, Poole, UK) on Western blots.

[0931] Cloning and Expression of an HA-hGH Fusion Protein.

[0932] In order to fuse the HA cDNA to the 5′ end of the hGH cDNA, the pHA1 HindIII-Bsu361 fragment (containing most of the HA cDNA) was joined to the pHGH1 EcoRI-HindIII fragment (containing most of the hGH cDNA) via two oligonucleotides, HGH7 and HGH8

| | | |
|---|---|---|
| HGH7: | 5′- TTAGGCTTATTCCCAAC 3′ | (SEQ ID NO: 5) |
| HGH8: | 5′- AATTGTTGGAATAAGCC 3′ | (SEQ ID NO: 6) |

[0933] The HindIII fragment so formed was cloned into pHA2 digested with HindIII to make pHGH10, and the NotI expression cassette of this plasmid was cloned into NotI-digested pSAC35 to make pHGH16.

[0934] pHGH16 was used to transform S. cerevisiae D88 and supernatants of cultures were analyzed as described above. A predominant band was observed that had a molecular weight of approximately 88 kD, corresponding to the combined masses of HA and hGH. Western blotting using anti-HA and anti-hGH antisera (Sigma) confirmed the presence of the two constituent parts of the albumin fusion protein.

[0935] The albumin fusion protein was purified from culture supernatant by cation exchange chromatography, followed by anion exchange and gel permeation chromatography. Analysis of the N-terminus of the protein by amino acid sequencing confirmed the presence of the expected albumin sequence.

[0936] An in vitro growth hormone activity assay (Ealey et al., Growth Regulation 5:36 (1995)) indicated that the albumin fusion protein possessed full hGH activity. In a hypophysectomised rat weight gain model, performed essentially as described in the European Pharmacopoeia (1987, monograph 556), the fusion molecule was more potent than hGH when the same number of units of activity (based on the above in vitro assay) were administered daily. Further experiments in which the albumin fusion protein was administered once every four days showed a similar overall growth response to a daily administration of hGH. Pharmacokinetic experiments in which ²⁵¹I-labeled protein was administered to rats indicated an approximately ten-fold increase in circulatory half-life for the albumin fusion protein compared to hGH.

[0937] A similar plasmid was constructed in which DNA encoding the S. cerevisiae invertase (SUC2) leader sequence replaced the sequence for the hybrid leader, such that the encoded leader and the junction (↓) with the HA sequence were as follows:

[0938] . . . MLLQAFLFLLAGFAAKISA↓DAHKS . . . (SEQ ID NO: 7) Invertase leader HA sequence . . .

[0939] On introduction into S. cerevisiae DBI, this plasmid directed the expression and secretion of the albumin fusion protein at a level similar to that obtained with pHGH16. Analysis of the N-terminus of the albumin fusion protein indicated precise and efficient cleavage of the leader sequence from the mature protein.

[0940] Cloning and Expression of an hGH-HA Fusion Protein.

[0941] In order to fuse the hGH cDNA to the 5′ end of the HA cDNA, the HA cDNA was first altered by site-directed mutagenesis to introduce an EcoNI site near the 5′ end of the coding region. This was done by the method of Kunkel et al. (Methods in Enzymol. 154:367 (1987)) using single-stranded DNA template prepared from pHAI and a synthetic oligonucleotide, LEU4:

| | | |
|---|---|---|
| LEU4: | 5′- GAGATGCACACCTGAGTGAGG -3′ | (SEQ ID NO: 8) |

[0942] Site-directed mutagenesis using this oligonucleotide changed the coding sequence of the HA cDNA from Lys4 to Leu4 (K4L). However, this change was repaired when the hGH cDNA was subsequently joined at the 5′ end by linking the pHGH2 NotI-BamHI fragment to the EcoNI-NotI fragment of the mutated pHAI, via the two oligonucleotides HGH5 and HGH6:

| | |
|---|---|
| HGH5: | |
| 5′-GATCCTGTGGCTTCGATGCACACAAGA-3′ | (SEQ ID NO: 9) |
| HGH6: | |
| 5′-CTCTTGTGTGCATCGAAGCCACAG-3′ | (SEQ ID NO: 10) |

[0943] The NotI fragment so formed was cloned into NotI-digested pSAC35 to make pHGH14. pHGH14 was used to transform S. cerevisiae D88 and supernatants of culture were analyzed as above. A predominant band was observed that had a molecular weight of approximately 88 kD, corresponding to the combined masses of hGH and HA. Western blotting using anti-HA and anti-hGH antisera confirmed the presence of the two constituent parts of the albumin fusion protein.

[0944] The albumin fusion protein was purified from culture supernatant by cation exchange chromatography, followed by anion exchange and gel permeation chromatography. Analysis of the N-terminus of the protein by amino acid sequencing confirmed the presence of the expected hGH sequence.

[0945] In vitro studies showed that the albumin fusion protein retained hGH activity, but was significantly less potent than an albumin fusion protein comprising full length HA (1-585) as the N-terminal portion and hGH as the C-terminal portion, as described above.

[0946] Construction of Plasmids for the Expression of hGH Fusions to Domains of HA.

[0947] Fusion polypeptides were made in which the hGH molecule was fused to the first two domains of HA (residues 1 to 387). Fusion to the N terminus of hGH was achieved by joining the pHA1 HindIII-SapI fragment, which contained most of the coding sequence for domains 1 and 2 of HA, to the pHGHI EcoRI-HindIII fragment, via the oligonucleotides HGH 11 and HGH 12:

| | |
|---|---|
| HGH11: | |
| 5′-TGTGGAAGAGCCTCAGAATTTATTCCCAAC- | (SEQ ID NO: 11) |
| 3′ | |
| HGH12: | |
| 5′- | (SEQ ID NO: 12) |
| AATTGTTGGGAATAAATTCTGAGGCTCTTCC-3′ | |

[0948] The HindIII fragment so formed was cloned into HindIII-digested pHA2 to make pHGH37 and the NotI expression cassette of this plasmid was cloned into NotI-digested pSAC35.

[0949] The resulting plasmid, pHGH38, contained an expression cassette that was found to direct secretion of the fusion polypeptide into the supernatant when transformed into S. cerevisiae DB 1. Western blotting using anti-HA and anti-hGH antisera confirmed the presence of the two constituent parts of the albumin fusion protein.

[0950] The albumin fusion protein was purified from culture supernatant by cation exchange chromatography followed by gel permeation chromatography.

[0951] In vivo studies with purified protein indicated that the circulatory half-life was longer than that of hGH, and similar to that of an albumin fusion protein comprising full-length HA (1-585) as the N-terminal portion and hGH as the C-terminal portion, as described above. In vitro studies showed that the albumin fusion protein retained hGH activity.

[0952] Using a similar strategy as detailed above, an albumin fusion protein comprising the first domain of HA (residues 1-194) as the N-terminal portion and hGH as the C-terminal portion, was cloned and expressed in S. cerevisiae DBL. Western blotting of culture supernatant using anti-HA and anti-hGH antisera confirmed the presence of the two constituent parts of the albumin fusion protein.

[0953] Fusion of HA to hGH Using a Flexible Linker Sequence

[0954] Flexible linkers, comprising repeating units of [Gly-Gly-Gly-Gly-Ser]ₙ, where n was either 2 or 3, were introduced between the HA and hGH albumin fusion protein by cloning of the oligonucleotides HGH16, HGH17, HGH18 and HGH19:

| | | |
|---|---|---|
| HGH16: | 5′-TTAGGCTTAGGTGGCGGTGGATCCGGCGGTGGTGGATCTTTCCCA AC-3′ | (SEQ ID NO: 13) |
| HGH17: | 5′-AATTGTTGGGAAAGATCCACCACCGCCGGATCCACCGCCACCTAAGCC-3′ | (SEQ ID NO: 14) |
| HGH18: | 5′-TTAGGCTTAGGCGGTGGTGGATCTGGTGGCGGCGGATCTGGTGGCGGTGGATCCTTCCCAAC-3′ | (SEQ ID NO: 15) |
| HGH19: | 5′-AATTGTTGGGAAGGATCCACCGCCACCAGATCCGCCGCCACCA GATCCACCACCGCCTAAGCC-3′ | (SEQ ID NO: 16) |

[0955] Annealing of HGH16 with HGH17 resulted in n=2, while HGH18 annealed to HGH19 resulted in n=3. After annealing, the double-stranded oligonucleotides were cloned with the EcoRI-Bsu361 fragment isolated from pHGH1 into Bsu361-digested pHGH10 to make pHGH56 (where n=2) and pHGH57 (where n=3). The NotI expression cassettes from these plasmids were cloned into NotI-digested pSAC35 to make pHGH58 and pHGH59, respectively.

[0956] Cloning of the oligonucleotides to make pHGH56 and pHGH57 introduced a BamHI site in the linker sequences. It was therefore possible to construct linker sequences in which n=1 and n=4, by joining either the HindIII-BamHI fragment from pHGH56 to the BamHI-HindIII fragment from pHGH57 (making n=1), or the HindIII-BamHI fragment from pHGH57 to the BamHI-HindIII fragment from pHGH56 (making n=2). Cloning of these fragments into the HindIII site of pHA2, resulted in pHGH60 (n=1) and pHGH61 (n=4). The NotI expression cassettes from pHGH60 and pHGH61 were cloned into NotI-digested pSAC35 to make pHGH62 and pHGH63, respectively.

[0957] Transformation of S. cerevisiae with pHGH58, pHGH59, pHGH62 and pHGH63 resulted in transformants that secreted the fusion polypeptides into the supernatant. Western blotting using anti-HA and anti-hGH antisera confirmed the presence of the two constituent parts of the albumin fusion proteins.

[0958] The albumin fusion proteins were purified from culture supernatant by cation exchange chromatography, followed by anion exchange and gel permeation chromatography. Analysis of the N-termini of the proteins by amino acid sequencing confirmed the presence of the expected albumin sequence. Analysis of the purified proteins by electrospray mass spectrometry confirmed an increase in mass of 315 D (n=1), 630 D (n=2), 945 D (n=3) and 1260 D (n=4) compared to the HA-hGH fusion protein described above. The purified protein was found to be active in vitro.

[0959] Increased Shelf-Life of HA-hGH fusion Proteins: Methods

[0960] HA-hGH and hGH were separately diluted in cell culture media containing 5% horse serum to final concentrations of 100-200 μg/ml and incubated at 4, 37 or 50° C. At time zero and at weekly intervals thereafter, aliquots of the samples were tested for their biological activity in the Nb2 cell proliferation assay, and the data normalized to the biological activity of the control (hGH solution at time zero). In other assays hGH and HA-hGH were incubated in phosphate buffer saline in at 4, 37 and 50 degree C.

[0961] Nb2 cell proliferation assay: The growth of these cells is dependent on hGH or other lactogenic hormones. In a typical experiment 10⁴ cells /well are plated in 96-well plate in the presence of different concentration of hGH or HA-hGH in media such as DMEM containing 5-10% horse serum for 24-48 hrs in the incubator. After the incubation period, 1:10 volume of MTT (5mg/ml in H₂O) is added to each well and the plate is incubated for a further 6-16 hrs. The growing cells convert MTT to insoluble formazan. The formazan is solublized by acidic isopropanol, and the color produced is measured at 570 nm on microtiter plate reader. The extent of formazan formation reflects the level of cellular proliferation.

[0962] Increased Shelf-Life of HA-hGH Fusion Proteins: Results

[0963] The fusion of Therapeutic proteins to albumin confers stability in aqueous or other solution. FIG. 1 depicts the extended shelf-life of an HA fusion protein in terms of the biological activity of HA-hGH remaining after storage in cell culture media for up to 5 weeks at 37° C. A solution of 200 μg/ml HA-hGH was prepared in tissue culture media containing 5% horse serum, and the solution incubated at 37° C. starting at time zero. At the indicated times, a sample was removed and tested for its biological activity in the Nb2 cell assay, at 2 ng/ml final concentration. As shown in FIG. 1, the biological activity of HA-hGH remains essentially intact (within experimental variation) after 5 weeks of incubation at 37° C. The recombinant hGH used as control for this experiment lost its biological activity in the first week of the experiment.

[0964] FIG. 2 shows the stability of HA-hGH after storage in cell culture media for up to 3 weeks at 4, 37, or 50° C. At time zero, a solution of HA-hGH was prepared in tissue culture media containing 5% horse serum, and incubated at 4, 37, and 50° C. At the indicated periods a sample was removed and assayed for its biological activity in the Nb2 cell proliferation assay, at 60 ng/ml final concentration. HA-hGH retains over 90% of its initial activity at all temperatures tested for at least 3 weeks after incubation while hGH loses its biological activity within the first week. This level of activity is further retained for at least 7 weeks at 37° C. and 5 weeks at 50° C. These results indicate that HA-hGH is highly stable in aqueous solution even under temperature stress.

[0965] FIGS. 3A and 3B show the stable biological activity of HA-hGH compared to hGH in the Nb2 cell proliferation assay. Nb2 cells were grown in the presence of increasing concentrations of recombinant hGH or HA-hGH, added at time zero. The cells were incubated for 24 or 48 hours before measuring the extent of proliferation by the MTT method. The increased stability of HA-hGH in the assay results in essentially the same proliferative activity at 24 hours (FIG. 3A) as at 48 hours FIG. 3B) while hGH shows a significant reduction in its proliferative activity after 48 hours of incubation (FIGS. 3A and 3B). Compared to hGH, the HA-hGH has lower biological potency after 1 day; the albumin fusion protein is about 5 fold less potent than hGH. However, after 2 days the HA-hGH shows essentially the same potency as hGH due to the short life of hGH in the assay. This increase in the stability of the hGH as an albumin fusion protein has a major unexpected impact on the biological activity of the protein. Although the potency of the albumin fusion proteins is slightly lower than the unfused counterparts in rapid bioassays, their biological stability results in much higher biological activity in the longer term in vitro assay or in vivo assays.

### Example 2

### Preparation of HA-Fusion Proteins

[0966] FIG. 4 shows a map of a plasmid (pPPC0005) that can be used as the base vector for cloning the cDNAs of therapeutic partners to form HA-fusions. For example, digestion of this vector with the restriction enzymes Bsu36I/Partial HindIII will allow for the insertion of a cDNA modified at the 5′ end to encode the last 5 amino acids of HA including the Bsu36I site and at the 3′ end to include a double stop codon and HindIII site. As another example, digestion of this vector with the restriction enzymes Bsu36II, SphI allows for the insertion of a cDNA modified at the 5′ end to encode the last 5 amino acids of HA including the Bsu36I site and at the 3′ end to include a double stop codon, HindIII site and the ADHI terminator sequence up to and including the SphI site.

[0967] This plasmid may easily be modified by one of skill in the art, for example, to modify, add or delete restriction sites so that one may more easily clone a Therapeutic protein, or fragment or variant of into the vector for the purpose of making an albumin fusion protein of the invention.

[0968] For example, for the purpose of making an albumin fusion. protein where the Therapeutic moiety is placed N-terminal to the (mature) albumin protein, restriction sites were added at the 5′ end of the DNA encoding HA in pPPC0005 shown in FIG. 4).

[0969] Because it was desired to add unique Xhol and Clal sites at the 5′ end of the DNA encoding the HA protein in pPPC0005, it was first necessary to remove those same sites from the plasmid (located 3′ of the ADH1 terminator sequence). This was accomplished by cutting pPPC0005 with XhoI and ClaI, filling in the sticky ends with T4 DNA polymerase, and religating the blunt ends to create pPPC0006

[0970] Engineering the Xho and Cla I restriction sites into the Fusion leader sequence just 5′ of the DNA encoding the HA protein in pPPC0006 was accomplished using two rounds of PCR. The first pair of oligonucleotides are those of SEQ ID NO:19 and SEQ ID NO:20. SEQ ID 19 contains four point mutations relative to the DNA sequence encoding the Fusion leaadr sequence and the beginning of the HA protein. These mutations are necessary to create the XhoI site in the fusion leader sequence and the Cla I site just at the beginning of the DNA encoding the HA protein. These four mutations are underlined in the sequence shown below. In pPPC0006 the nucleotides at these four positions from 5′ to 3′ are T, G, T, and G. 5′-GCCTCGAGAAAAGAGATGCACACAAGAGTGAGGTTGCTCATCGATTTAAAGATTTGGG-3′ (SEQ ID NO:19); 5′-AATCGATGAGCAACCTCACTCTTGTGTGCATCTCTTTTCTCGAGGCTCCTGGAATAAGC-3′ (SEQ ID NO:20). A second round of PCR is then performed with an upstream flanking primer, 5′-TACAAACTTAAGAGTCCAATTAGC-3′ (SEQ ID NO:21) and a downstream flanking primer 5′-CACTTCTCTAGAGTGGTTTCATATGTCTT-3′ (SEQ ID NO:22). The resulting PCR product is then purified and then digested with AflI and XbaI and ligated into the same sites in pPPC0006 creating pScCHSA. The resulting plasmid will have an XhoI sites engineered into the fusion leader sequence. The presence of the XhoI site creates a single amino acid change in the end of fusion leader sequence from LDKR to LEKR. The D to E change will not be present in the final albumin fusion protein expression plasmid if one ligates into the XhoI and Cla I sites a fragment comprising the Therapeutic moiety which has a 5′ SalI sticky end (which is compatible with the XhoI end) and a 3′ ClaI end. Ligation of the XhoI to the SalI restores the original amino acid sequence of the Fusion leader sequence. The therapeutic protein moiety may be inserted after the Kex2 site (Kex2 claeves after the dibasic amino acid sequence KR at the end of the Fusion leader sequence) and before the ClaI site.

[0971] In addition, for the purpose of making an albumin fusion protein where the Therapeutic moiety is placed C-terminal to the (mature) albumin protein, four, eight-base-pair restriction sites were added at the 3′ end of the DNA encoding HA in pScCHSA. As an example, it was felt to be desirable to incorporate AscI, FseI, and PmeI restriction sites in between the Bsu36I and HindIII sites at the end of the DNA encoding the HA protein in pScCHSA. This was accomplished through the use of two complementary synthetic oligonucleotides (SEQ ID NO:19 and SEQ ID NO:20) which contain the desired restriction sites. 5′-AAGCTGCCTTAGGCTTATAATAAGGCGCGCCGGCCGGCCGTTTAAACTAAGCTTA ATTCT-3′ (SEQ ID NO:23) and 5-AGAATTAAGCTTAGTTTAAACGGCCGGCCGGCGCGCCTTATTATAAGCCTAAGGCAGCTT-3′ (SEQ ID NO:24). These oligonucleotides may be annealed and digested with Bsu36I and HindIII and ligated into the same sites located at the end of the DNA encoding the HA protein in pScCHSA creating pScNHSA, using techniques known in the art.

[0972] Making Vectors Comprising Albumin Fusion Proteins where the Albumin Moiety is N-Terminal to the Therapeutic Moiety.

[0973] The DNA encoding the Therapeutic moiety may be PCR amplified using primers that will add DNA encoding the last five amino acids of the HA (and containing the Bsu36I site) onto the 5′ end of the DNA encoding a Therapeutic protein and a STOP codon and appropriate cloning sites onto the 3′ end of the coding sequence. For instance, the forward primer used to amplify the DNA encoding a therapeutic protein might have the sequence, 5′-aagctGCCTIAGGCTTA(N)₁₅-3′ (SEQ ID NO:25) where the underlined sequence is a Bsu36I site, the upper case nucleotides encode the last four amino acids of the mature HA protein (ALGL), and (N)₁₅ is identical to the first 15 nucleotides encoding the Therapetic protein of interest. Similarly, the reverse primer used to amplify the DNA encoding a therapeutic protein might have the sequence,

[chemical structure]

where the italicized nucleotides is a PmeI site, the double underlined nucleotides are a FseI site, the singly underlined text is a PmeI site, the boxed nucleotides are the reverse complement of two tandem stop codons, and (N)₁₅ is identical to the reverse complement of the last 15 nucleotides encoding the Therapeutic protein of interest. Once the PCR product is amplified it may be cut with Bsu36I and one of (AscI, FseI, or PmeI) and ligated into pScNHSA.

[0974] Making Vectors Comprising Albumin Fusion Proteins where the Albumin Moiety is N-Terminal to the Therapeutic Moiety.

[0975] The DNA encoding the Therapeutic moiety may be PCR amplified using primers that will add DNA encoding the last three amino acids of the Fusion leader sequence (and containing a SalI site) onto the 5′ end of the DNA encoding a Therapeutic protein and the first few amino acids of the HA (and containing a ClaI site. For instance, the forward primer used to amplify the DNA encoding a therapeutic protein might have the sequence, 5′-aggagcgtcGACAAAAGA(N)₁₅-3′ (SEQ ID NO:27) where the underlined sequence is a Sal I site, the upper case nucleotides encode the last three amino acids of the Fusion leader sequence (DKR), and (N)₁₅ is identical to the first 15 nucleotides encoding the Therapetic protein of interest. Similarly, the reverse primer used to amplify the DNA encoding a therapeutic protein might have the sequence, 5′-CTTTAAATCGATGAGCAACCTCACTCTTGTGTGCATC(N)₁₅-3′ (SEQ ID NO:28) where the italicized nucleotides are a ClaI site, the underlined nucleotides are the reverse complement of the DNA encoding the first 9 amino acids of HA (DAHKSEVAH), and (N)₁₅ is identical to the reverse complement of the last 15 nucleotides encoding the Therapeutic protein of interest. Once the PCR product is amplified it may be cut with SalI and ClaI and ligated into pScCHSA digested with XhoI and Cla I.

[0976] Expression of an Albumin Fusion Protein in Yeast.

[0977] The Not I fragment containing the DNA encoding either an N-terminal or C-terminal albumin fusion protein generated from pScCHSA or pScNHSA may then be cloned in to the NotI site of pSAC35.

[0978] Expression of an Albumin Fusion Protein from Mammalian Cell Lines

[0979] The HSA gene has also been cloned into a the pC4 vector which is more suitable for mammalian culture systems creating plasmid pC4:HSA. More specifically, pC4HSA was generated by PCR amplifying the mature HSA gene with a 5′ primer (SEQ ID NO:30) that anneals to the 5′ end of DNA encoding the mature form of the HSA protein (e.g, DNA in plasmid pScCHSA), incorporates BamHI (Shown in italics below) and HindIII (shown singly underlined below) cloning sites, attaches a kozak sequence (shown double underlined below) and DNA encoding the natural HSA signal peptide (MKWVSFISLLFLFSSAYSRSLDKR, SEQ ID NO:29) (shown in bold below), and a 3′ primer (SEQ ID NO:31) that anneals to the 3′ end of DNA encoding the mature form of the HSA protein and incorporates an Asp718 restriction site (shown in bold below). The DNA encoding the natural human serum albumin leader sequence in SEQ ID NO:30 also contains a modification that introduces a XhoI site that is boxed below.

[chemical structure]

[0980] This PCR product (1.85 kb) is then purified and digested with BamHI and Asp718 and cloned into the same sites in pC4 (ATCC Accession No. 209646) to produce pC4:HSA

[0981] Making Vectors Comprising Albumin Fusion Proteins where the Albumin Moiety is C-Terminal to the Therapeutic Moiety using the pC4:HSA Vector

[0982] Using pC4:HSA, albumin fusion proteins in which the Therapeutic protein moiety is N terminal to the albumin sequence, one can clone DNA encoding a Therapeutic protein that has its own signal sequence between the Bam HI (or HindIII) and ClaI sites. When cloning into either the BamHI or Hind III site remember to include Kozak sequence (CCGCCACCATG) prior to translational start codon of DNA encoding the Therapeutic Protein to be subcloned. If the Therapeutic does not have a signal sequence, the DNA encoding that Therapeutic protein may be cloned in between the XhoI and ClaI sites. When using the XhoI site, the following 5′ (SEQ ID NO:32) and 3′ (SEQ ID NO:33) PCR primers may be used:

(SEQ ID NO: 32)

5′-CCGCCGCTCGAGGGGTGTGTTTCGTCGA(N)₁₈-3′

(SEQ ID NO: 33)

5′-AGTCCCATCGATGAGCAACCTCACTC1TGTGTGCATC(N)₁₈-3′

[0983] In SEQ ID NO:32, the underlined sequence is an XhoI site; and the XhoI site and the DNA following the XhoI site encode for the last seven amino acids of the leader sequence of natural human serum albumin. In SEQ ID NO:33, the underlined sequence is a ClaI site; and the ClaI site and the DNA following it encode are the reverse complement of the DNA encoding the first 10 amino acids of the mature HSA protein (SEQ ID NO:18). In SEQ ID NO:32 “(N)₁₈” is DNA identical to the first 18 nucleotides encoding the Therapeutic protein of interest.). In SEQ ID NO:33 “(N)₁₈” is the reverse complement of DNA encoding the last 18 nucleotides encoding the Therapeutic protein of interest. Using these two primers, one may PCR amplify the Therapeutic protein of interest, purify the PCR product, digest it with XhoI and ClaI restriction enzymes and then and clone it into the with XhoI and ClaI sites in the pC4:HSA vector.

[0984] Making Vectors Comprising Albumin Fusion Proteins where the Albumin Moiety is N-Terminal to the Therapeutic Moiety using the pC4:HSA Vector

[0985] Using pC4:HSA, albumin fusion proteins in which the Therapeutic protein moiety is N terminal to the albumin sequence, one can clone DNA encoding a Therapeutic protein between the Bsu36I and AscI restriction sites. When cloning into the Bsu36I and AscI, the same primer design used to clone in the yeast vector system (SEQ ID NO:25 and 26) may be employed.

[0986] The pC4 vector is especially suitable for expression of albumin fusion proteins from CHO cells. For expression, in other mammalian cell types, e.g., NSO cells, it may be useful to subclone the HindIII-EcoRI fragment containing the DNA encoding an albumin fusion protein (from a pC4 vector in which the DNA encoding the Therapeutic protein has already been cloned in frame with the DNA encoding (the mature form of) human serum albumin) into another expression vector (such as any of the mammalian expression vectors described herein).

### Example 3

### Preparation of HA-Cytokine or HA-Growth Factor Fusion Proteins (Such as EPO, GMCSF, GCSF)

[0987] The cDNA for the cytokine or growth factor of interest, such as EPO, can be isolated by a variety of means including from cDNA libraries, by RT-PCR and by PCR using a series of overlapping synthetic oligonucleotide primers, all using standard methods. The nucleotide sequences for all of these proteins are known and available, for instance, in U.S. Pat. Nos. 4,703,008, 4,810,643 and 5,908,763. The cDNA can be tailored at the 5′ and 3′ ends to generate restriction sites, such that oligonucleotide linkers can be used, for cloning of the cDNA into a vector containing the cDNA for HA. This can be at the N or C-terminus with or without the use of a spacer sequence. EPO (or other cytokine) cDNA is cloned into a vector such as pPPC0005 (FIG. 4), pScCHSA, pScNHSA, or pC4:HSA from which the complete expression cassette is then excised and inserted into the plasmid pSAC35 to allow the expression of the albumin fusion protein in yeast. The albumin fusion protein secreted from the yeast can then be collected and purified from the media and tested for its biological activity. For expression in mammalian cell lines, a similar procedure is adopted except that the expression cassette used employs a mammalian promoter, leader sequence and terminator (See Example 2). This expression cassette is then excised and inserted into a plasmid suitable for the transfection of mammalian cell lines.

### Example 4

### Preparation of HA-IFN Fusion Proteins (such as IFNα)

[0988] The cDNA for the interferon of interest such as IFNet can be isolated by a variety of means including but not exclusively, from cDNA libraries, by RT-PCR and by PCR using a series of overlapping synthetic oligonucleotide primers, all using standard methods. The nucleotide sequences for interferons, such as IFNα are known and available, for instance, in U.S. Pat. Nos. 5,326,859 and 4,588,585, in EP 32 134, as well as in public databases such as GenBank. The cDNA can be tailored at the 5′ and 3′ ends to generate restriction sites, such that oligonucleotide linkers can be used to clone the cDNA into a vector containing the cDNA for HA. This can be at the N or C-terminus of the HA sequence, with or without the use of a spacer sequence. The IFNα (or other interferon) cDNA is cloned into a vector such as pPPC0005 (FIG. 4), pScCHSA, pScNHSA, or pC4:HSA from which the complete expression cassette is then excised and inserted into the plasmid pSAC35 to allow the expression of the albumin fusion protein in yeast (see FIG. 8). The albumin fusion protein secreted from the yeast can then be collected and purified from the media and tested for its biological activity. For expression in mammalian cell lines a similar procedure is adopted except that the expression cassette used employs a mammalian promoter, leader sequence and terminator (See Example 2). This expression cassette is then excised and inserted into a plasmid suitable for the transfection of mammalian cell lines.

[0989] Maximum Protein Recovery from Vials

[0990] The albumin fusion proteins of the invention have a high degree of stability even when they are packaged at low concentrations. In addition, in spite of the low protein concentration, good fusion-protein recovery is observed even when the aqueous solution includes no other protein added to minimize binding to the vial walls. FIG. 5 compares the recovery of vial-stored HA-IFN solutions with a stock solution. 6 or 30 μg/ml HA-IFN solutions were placed in vials and stored at 4° C. After 48 or 72 hrs a volume originally equivalent to 10 ng of sample was removed and measured in an IFN sandwich ELISA. The estimated values were compared to that of a high concentration stock solution. As shown, there is essentially no loss of the sample in these vials, indicating that addition of exogenous material such as albumin is not necessary to prevent sample loss to the wall of the vials

[0991] In Vivo Stability and Bioavailability of HA-α-IFN Fusions

[0992] To determine the in vivo stability and bioavailability of a HA-α-IFN fusion molecule, the purified fusion molecule (from yeast) was administered to monkeys at the dosages and time points described in FIGS. 6 and 7. Pharmaceutical compositions formulated from HA-α-IFN fusions may account for the extended serum half-life and bioavailability exemplified in FIGS. 6 and 7. Accordingly, pharmaceutical compositions may be formulated to contain lower dosages of alpha-interferon activity compared to the native alpha-interferon molecule.

[0993] Pharmaceutical compositions containing HA-α-IFN fusions may be used to treat or prevent disease in patients with any disease or disease state that can be modulated by the administration of α-IFN. Such diseases include, but are not limited to, hairy cell leukemia, Kaposi's sarcoma, genital and anal warts, chronic hepatitis B, chronic non-A, non-B hepatitis, in particular hepatitis C, hepatitis D, chronic myelogenous leukemia, renal cell carcinoma, bladder carcinoma, ovarian and cervical carcinoma, skin cancers, recurrent respirator papiliomatosis, non-Hodgkin's and cutaneous T-cell lymphomas, melanoma, multiple myeloma, AIDS, multiple sclerosis, gliobastoma, etc. (see Interferon Alpha, In: AHFS Drug Information, 1997.

[0994] Accordingly, the invention includes pharmaceutical compositions containing a HA-α-IFN fusion protein, polypeptide or peptide formulated with the proper dosage for human administration. The invention also includes methods of treating patients in need of such treatment comprising at least the step of administering a pharmaceutical composition containing at least one HA-α-IFN fusion protein, polypeptide or peptide.

[0995] Bifunctional HA-α-IFN Fusions

[0996] The HA-α-IFN expression vector of FIG. 8 is modified to include an insertion for the expression of bifunctional HA-α-IFN fusion proteins. For instance, the cDNA for a second protein of interest may be inserted in frame downstream of the “rHA-IFN” sequence after the double stop codon has been removed or shifted downstream of the coding sequence.

[0997] In one version of a bifunctional HA-A-IFN fusion protein, an antibody or fragment against B-lymphocyte stimulator protein (GenBank Acc 4455139) or polypeptide may be fused to one end of the HA component of the fusion molecule. This bifunctional protein is useful for modulating any immune response generated by the α-IFN component of the fusion.

### Example 5

### Preparation of HA-Hormone Fusion Protein (Such as Insulin, LH, FSH)

[0998] The cDNA for the hormone of interest such as insulin can be isolated by a variety of means including but not exclusively, from cDNA libraries, by RT-PCR and by PCR using a series of overlapping synthetic oligonucleotide primers, all using standard methods. The nucleotide sequences for all of these proteins are known and available, for instance, in public databases such as GenBank. The cDNA can be tailored at the 5′ and 3′ ends to generate restriction sites, such that oligonucleotide linkers can be used, for cloning of the cDNA into a vector containing the cDNA for HA. This can be at the N or C-terminus with or without the use of a spacer sequence. The hormone cDNA is cloned into a vector such as pPPC0005 (FIG. 4), pScCHSA, pScNHSA, or pC4:HSA from which the complete expression cassette is then excised and inserted into the plasmid pSAC35 to allow the expression of the albumin fusion protein in yeast. The albumin fusion protein secreted from the yeast can then be collected and purified from the media and tested for its biological activity. For expression in mammalian cell lines a similar procedure is adopted except that the expression cassette used employs a mammalian promoter, leader sequence and terminator (See Example 2). This expression cassette is then excised and inserted into a plasmid suitable for the transfection of mammalian cell lines.

### Example 6

### Preparation of HA-Soluble Receptor or HA-Binding Protein Fusion Protein Such as HA-TNF Receptor

[0999] The cDNA for the soluble receptor or binding protein of interest such as TNF receptor can be isolated by a variety of means including but not exclusively, from cDNA libraries, by RT-PCR and by PCR using a series of overlapping synthetic oligonucleotide primers, all using standard methods. The nucleotide sequences for all of these proteins are known and available, for instance, in GenBank. The cDNA can be tailored at the 5′ and 3′ ends to generate restriction sites, such that oligonucleotide linkers can be used, for cloning of the cDNA into a vector containing the cDNA for HA. This can be at the N or C-terminus with or without the use of a spacer sequence. The receptor cDNA is cloned into a vector such as pPPC0005 (FIG. 4), pScCHSA, pScNHSA, or pC4:HSA from which the complete expression cassette is then excised and inserted into the plasmid pSAC35 to allow the expression of the albumin fusion protein in yeast. The albumin fusion protein secreted from the yeast can then be collected and purified from the media and tested for its biological activity. For expression in mammalian cell lines a similar procedure is adopted except that the expression cassette used employs a mammalian promoter, leader sequence and terminator (See Example 2). This expression cassette is then excised and inserted into a plasmid suitable for the transfection of mammalian cell lines.

### Example 7

### Preparation of HA-Growth Factors Such as HA-IGF-1 Fusion Protein

[1000] The cDNA for the growth factor of interest such as IGF-I can be isolated by a variety of means including but not exclusively, from cDNA libraries, by RT-PCR and by PCR using a series of overlapping synthetic oligonucleotide primers, all using standard methods (see GenBank Acc. No. NP_{—}000609). The cDNA can be tailored at the 5′ and 3′ ends to generate restriction sites, such that oligonucleotide linkers can be used, for cloning of the cDNA into a vector containing the cDNA for HA. This can be at the N or C-terminus with or without the use of a spacer sequence. The growth factor cDNA is cloned into a vector such as pPPC0005 (FIG. 4), pScCHSA, pScNHSA, or pC4:HSA from which the complete expression cassette is then excised and inserted into the plasmid pSAC35 to allow the expression of the albumin fusion protein in yeast. The albumin fusion protein secreted from the yeast can then be collected and purified from the media and tested for its biological activity. For expression in mammalian cell lines a similar procedure is adopted except that the expression cassette used employs a mammalian promoter, leader sequence and terminator (See Example 2). This expression cassette is then excised and inserted into a plasmid suitable for the transfection of mammalian cell lines.

### Example 8

### Preparation of HA-Single Chain Antibody Fusion Proteins

[1001] Single chain antibodies are produced by several methods including but not limited to: selection from phage libraries, cloning of the variable region of a specific antibody by cloning the cDNA of the antibody and using the flanking constant regions as the primer to clone the variable region, or by synthesizing an oligonucleotide corresponding to the variable region of any specific antibody. The cDNA can be tailored at the 5′ and 3′ ends to generate restriction sites, such that oligonucleotide linkers can be used, for cloning of the cDNA into a vector containing the cDNA for HA. This can be at the N or C-terminus with or without the use of a spacer sequence. The cell cDNA is cloned into a vector such as pPPC0005 (FIG. 4), pScCHSA, pScNHSA, or pC4:HSA from which the complete expression cassette is then excised and inserted into the plasmid pSAC35 to allow the expression of the albumin fusion protein in yeast.

[1002] In fusion molecules of the invention, the V_{H} and V_{L} can be linked by one of the following means or a combination thereof: a peptide linker between the C-terminus of the V_{H} and the N-terminus of the V_{L}; a Kex2p protease cleavage site between the V_{H and V}_{L} such that the two are cleaved apart upon secretion and then self associate; and cystine residues positioned such that the V_{H} and V_{L} can form a disulphide bond between them to link them together (see FIG. 14). An alternative option would be to place the V_{H} at the N-terminus of HA or an HA domain fragment and the V_{L} at the C-terminus of the HA or HA domain fragment.

[1003] The albumin fusion protein secreted from the yeast can then be collected and purified from the media and tested for its activity. For expression in mammalian cell lines a similar procedure is adopted except that the expression cassette used employs a mammalian promoter, leader sequence and terminator (See Example 2). This expression cassette is then excised and inserted into a plasmid suitable for the transfection of mammalian cell lines. The antibody produced in this manner can be purified from media and tested for its binding to its antigen using standard immunochemical methods.

### Example 9

### Preparation of HA-Cell Adhesion Molecule Fusion Proteins

[1004] The cDNA for the cell adhesion molecule of interest can be isolated by a variety of means including but not exclusively, from cDNA libraries, by RT-PCR and by PCR using a series of overlapping synthetic oligonucleotide primers, all using standard methods. The nucleotide sequences for the known cell adhesion molecules are known and available, for instance, in GenBank. The cDNA can be tailored at the 5′ and 3′ ends to generate restriction sites, such that oligonucleotide linkers can be used, for cloning of the cDNA into a vector containing the cDNA for HA. This can be at the N or C-terminus with or without the use of a spacer sequence. The cell adhesion molecule cDNA is cloned into a vector such as pPPC0005 (FIG. 4), pScCHSA, pScNHSA, or pC4:HSA from which the complete expression cassette is then excised and inserted into the plasmid pSAC35 to allow the expression of the albumin fusion protein in yeast. The albumin fusion protein secreted from the yeast can then be collected and purified from the media and tested for its biological activity. For expression in mammalian cell lines a similar procedure is adopted except that the expression cassette used employs a mammalian promoter, leader sequence and terminator (See Example 2). This expression cassette is then excised and inserted into a plasmid suitable for the transfection of mammalian cell lines.

### Example 10

### Preparation of Inhibitory Factors and Peptides as HA Fusion Proteins (Such as HA-Antiviral HA-Antibiotic, HA-Enzyme Inhibitor and HA-Anti-Allergic Proteins)

[1005] The cDNA for the peptide of interest such as an antibiotic peptide can be isolated by a variety of means including but not exclusively, from cDNA libraries, by RT-PCR and by PCR using a series of overlapping synthetic oligonucleotide primers, all using standard methods. The cDNA can be tailored at the 5′ and 3′ ends to generate restriction sites, such that oligonucleotide linkers can be used, for cloning of the cDNA into a vector containing the cDNA for HA. This can be at the N or C-terminus with or without the use of a spacer sequence. The peptide cDNA is cloned into a vector such as pPPC0005 (FIG. 4), pScCHSA, pScNHSA, or pC4:HSA from which the complete expression cassette is then excised and inserted into the plasmid pSAC35 to allow the expression of the albumin fusion protein in yeast. The albumin fusion protein secreted from the yeast can then be collected and purified from the media and tested for its biological activity. For expression in mammalian cell lines a similar procedure is adopted except that the expression cassette used employs a mammalian promoter, leader sequence and terminator (See Example 2). This expression cassette is then excised and inserted into a plasmid suitable for the transfection of mammalian cell lines.

### Example 11

### Preparation of Targeted HA Fusion Proteins

[1006] The cDNA for the protein of interest can be isolated from cDNA library or can be made synthetically using several overlapping oligonucleotides using standard molecular biology methods. The appropriate nucleotides can be engineered in the cDNA to form convenient restriction sites and also allow the attachment of the protein cDNA to albumin cDNA similar to the method described for hGH. Also a targeting protein or peptide cDNA such as single chain antibody or peptides, such as nuclear localization signals, that can direct proteins inside the cells can be fused to the other end of albumin. The protein of interest and the targeting peptide is cloned into a vector such as pPPC0005 (FIG. 4), pScCHSA, pScNHSA, or pC4:HSA which allows the fusion with albumin cDNA. In this manner both N- and C-terminal end of albumin are fused to other proteins. The fused cDNA is then excised from pPPC0005 and is inserted into a plasmid such as pSAC35 to allow the expression of the albumin fusion protein in yeast. All the above procedures can be performed using standard methods in molecular biology. The albumin fusion protein secreted from yeast can be collected and purified from the media and tested for its biological activity and its targeting activity using appropriate biochemical and biological tests.

### Example 12

### Preparation of HA-Enzymes Fusions

[1007] The cDNA for the enzyme of interest can be isolated by a variety of means including but not exclusively, from cDNA libraries, by RT-PCR and by PCR using a series of overlapping synthetic oligonucleotide primers, all using standard methods. The cDNA can be tailored at the 5′ and 3′ ends to generate restriction sites, such that oligonucleotide linkers can be used, for cloning of the cDNA into a vector containing the cDNA for HA. This can be at the N or C-terminus with or without the use of a spacer sequence. The enzyme cDNA is cloned into a vector such as pPPC0005 (FIG. 4), pScCHSA, pScNHSA, or pC4:HSA from which the complete expression cassette is then excised and inserted into the plasmid pSAC35 to allow the expression of the albumin fusion protein in yeast. The albumin fusion protein secreted from the yeast can then be collected and purified from the media and tested for its biological activity. For expression in mammalian cell lines a similar procedure is adopted except that the expression cassette used employs a mammalian promoter, leader sequence and terminator (See Example 2). This expression cassette is then excised and inserted into a plasmid suitable for the transfection of mammalian cell lines.

### Example 13

### Bacterial Expression of an Albumin Fusion Protein

[1008] A polynucleotide encoding an albumin fusion protein of the present invention comprising a bacterial signal sequence is amplified using PCR oligonucleotide primers corresponding to the 5′ and 3′ ends of the DNA sequence, to synthesize insertion fragments. The primers used to amplify the polynucleotide encoding insert should preferably contain restriction sites, such as BamHI and XbaI, at the 5′ end of the primers in order to clone the amplified product into the expression vector. For example, BamHI and XbaI correspond to the restriction enzyme sites on the bacterial expression vector pQE-9. (Qiagen, Inc., Chatsworth, Calif.). This plasmid vector encodes antibiotic resistance (Amp^{r}), a bacterial origin of replication (ori), an IPTG-regulatable promoter/operator (P/O), a ribosome binding site (RBS), a 6-histidine tag (6-His), and restriction enzyme cloning sites.

[1009] The pQE-9 vector is digested with BamHI and XbaI and the amplified fragment is ligated into the pQE-9 vector maintaining the reading frame initiated at the bacterial RBS. The ligation mixture is then used to transform the E. coli strain M15/rep4 (Qiagen, Inc.) which contains multiple copies of the plasmid pREP4, which expresses the lacI repressor and also confers kanamycin resistance (Kan^{r}). Transformants are identified by their ability to grow on LB plates and ampicillin/kanamycin resistant colonies are selected. Plasmid DNA is isolated and confirmed by restriction analysis.

[1010] Clones containing the desired constructs are grown overnight (O/N) in liquid culture in LB media supplemented with both Amp (100 ug/ml) and Kan (25 ug/ml). The O/N culture is used to inoculate a large culture at a ratio of 1:100 to 1:250. The cells are grown to an optical density 600 (O.D.⁶⁰⁰) of between 0.4 and 0.6. IFTG (Isopropyl-B-D-thiogalacto pyranoside) is then added to a final concentration of 1 mM. IPTG induces by inactivating the lad repressor, clearing the P/O leading to increased gene expression.

[1011] Cells are grown for an extra 3 to 4 hours. Cells are then harvested by centrifugation (20 mins at 6000×g). The cell pellet is solubilized in the chaotropic agent 6 Molar Guanidine HCl or preferably in 8 M urea and concentrations greater than 0.14 M 2-mercaptoethanol by stirring for 3-4 hours at 4° C. (see, e.g., Burton et al., Eur. J. Biochem. 179:379-387 (1989). The cell debris is removed by centrifugation, and the supernatant containing the polypeptide is loaded onto a nickel-nitrilo-tri-acetic acid (“Ni—NTA”) affinity resin column (available from QIAGEN, Inc., supra). Proteins with a 6×His tag bind to the Ni—NTA resin with high affinity and can be purified in a simple one-step procedure (for details see: The QIAexpressionist (1995) QIAGEN, Inc., supra).

[1012] Briefly, the supernatant is loaded onto the column in 6 M guanidine-HCl, pH 8. The column is first washed with 10 volumes of 6 M guanidine-HCl, pH 8, then washed with 10 volumes of 6 M guanidine-HCl pH 6, and finally the polypeptide is eluted with 6 M guanidine-HCl, pH 5.

[1013] The purified protein is then renatured by dialyzing it against phosphate-buffered saline (PBS) or 50 mM Na-acetate, pH 6 buffer plus 200 mM NaCl. Alternatively, the protein can be successfully refolded while immobilized on the Ni—NTA column. Exemplary conditions are as follows: renature using a linear 6M-1M urea gradient in 500 mM NaCl, 20% glycerol, 20 mM Tris/HCl pH 7.4, containing protease inhibitors. The renaturation should be performed over a period of 1.5 hours or more. After renaturation the proteins are eluted by the addition of 250 mM immidazole. Immidazole is removed by a final dialyzing step against PBS or 50 mM sodium acetate pH 6 buffer plus 200 mM NaCl. The purified protein is stored at 4° C. or frozen at −80° C.

[1014] In addition to the above expression vector, the present invention further includes an expression vector, called pHE4a (ATCC Accession Number 209645, deposited on Feb. 25, 1998) which contains phage operator and promoter elements operatively linked to a polynucleotide encoding an albumin fusion protein of the present invention, called pHE4a. (ATCC Accession Number 209645, deposited on Feb. 25, 1998.) This vector contains: 1) a neomycinphosphotransferase gene as a selection marker, 2) an E. coli origin of replication, 3) a T5 phage promoter sequence, 4) two lac operator sequences, 5) a Shine-Delgamo sequence, and 6) the lactose operon repressor gene (lacIq). The origin of replication (oriC) is derived from pUC19 (LTI, Gaithersburg, Md.). The promoter and operator sequences are made synthetically.

[1015] DNA can be inserted into the pHE4a by restricting the vector with NdeI and XbaI, BamHI, XhoI, or Asp718, running the restricted product on a gel, and isolating the larger fragment (the stuffer fragment should be about 310 base pairs). The DNA insert is generated according to PCR protocols described herein or otherwise known in the art, using PCR primers having restriction sites for NdeI (5′ primer) and XbaI, BamHI, XhoI, or Asp718 (3′ primer). The PCR insert is gel purified and restricted with compatible enzymes. The insert and vector are ligated according to standard protocols.

[1016] The engineered vector may be substituted in the above protocol to express protein in a bacterial system.

### Example 14

### Expression of an Albumin Fusion Protein in Mammalian Cells

[1017] The albumin fusion proteins of the present invention can be expressed in a mammalian cell. A typical mammalian expression vector contains a promoter element, which mediates the initiation of transcription of mRNA, a protein coding sequence, and signals required for the termination of transcription and polyadenylation of the transcript. Additional elements include enhancers, Kozak sequences and intervening sequences flanked by donor and acceptor sites for RNA splicing. Highly efficient transcription is achieved with the early and late promoters from SV40, the long terminal repeats (LTRs) from Retroviruses, e.g., RSV, HTLVI, HIVI and the early promoter of the cytomegalovirus (CMV). However, cellular elements can also be used (e.g., the human actin promoter).

[1018] Suitable expression vectors for use in practicing the present invention include, for example, vectors such as, pSVL and pMSG (Pharmacia, Uppsala, Sweden), pRSVcat (ATCC 37152), pSV2dhfr (ATCC 37146), pBC12MI (ATCC 67109), pCMVSport 2.0, and pCMVSport 3.0. Mammalian host cells that could be used include, but are not limited to, human Hela, 293, H9 and Jurkat cells, mouse NIH3T3 and C127 cells, Cos 1, Cos 7 and CV1, quail QC1-3 cells, mouse L cells and Chinese hamster ovary (CHO) cells.

[1019] Alternatively, the albumin fusion protein can be expressed in stable cell fines containing the polynucleotide encoding the albumin fusion protein integrated into a chromosome. The co-transfection with a selectable marker such as DHFR, gpt, neomycin, or hygromycin allows the identification and isolation of the transfected cells.

[1020] The transfected polynucleotide encoding the fusion protein can also be amplified to express large amounts of the encoded fusion protein. The DHFR (dihydrofolate reductase) marker is useful in developing cell lines that carry several hundred or even several thousand copies of the gene of interest. (See, e.g., Alt et al., J. Biol. Chem. 253:1357-1370 (1978); Hamlin et al., Biochem. et Biophys. Acta, 1097:107-143 (1990); Page et al., Biotechnology 9:64-68 (1991)). Another useful selection marker is the enzyme glutamine synthase (GS) (Murphy et al., Biochem J. 227:277-279 (1991); Bebbington et al., Biotechnology 10: 169-175 (1992). Using these markers, the mammalian cells are grown in selective medium and the cells with the highest resistance are selected. These cell lines contain the amplified gene(s) integrated into a chromosome. Chinese hamster ovary (CHO) and NSO cells are often used for the production of proteins.

[1021] Derivatives of the plasmid pSV2-dhfr (ATCC Accession No. 37146), the expression vectors pC4 (ATCC Accession No. 209646) and pC6 (ATCC Accession No. 209647) contain the strong promoter (LTR) of the Rous Sarcoma Virus (Cullen et al., Molecular and Cellular Biology, 438-447 (March, 1985)) plus a fragment of the CMV-enhancer (Boshart et al., Cell 41:521-530 (1985). Multiple cloning sites e.g., with the restriction enzyme cleavage sites BamHI, XbaI and Asp718, facilitate the cloning of the gene of interest. The vectors also contain the 3′ intron, the polyadenylation and termination signal of the rat preproinsulin gene, and the mouse DHFR gene under control of the SV40 early promoter.

[1022] Specifically, the plasmid pC6, for example, is digested with appropriate restriction enzymes and then dephosphorylate using calf intestinal phosphates by procedures known in the art. The vector is then isolated from a 1% agarose gel.

[1023] A polynucleotide encoding an albumin fusion protein of the present invention is generated using techniques known in the art and this polynucleotide is amplified using PCR technology known in the art. If a naturally occurring signal sequence is used to produce the fusion protein of the present invention, the vector does not need a second signal peptide. Alternatively, if a naturally occurring signal sequence is not used, the vector can be modified to include a heterologous signal sequence. (See, e.g., International Publication No. WO 96/34891.)

[1024] The amplified fragment encoding the fusion protein of the invention is isolated from a 1% agarose gel using a commercially available kit (“Geneclean,” BIO 101 Inc., La Jolla, Calif.). The fragment then is digested with appropriate restriction enzymes and again purified on a 1% agarose gel.

[1025] The amplified fragment encoding the albumin fusion protein of the invention is then digested with the same restriction enzyme and purified on a 1% agarose gel. The isolated fragment and the dephosphorylated vector are then ligated with T4 DNA ligase. E. coli HB101 or XL-1 Blue cells are then transformed and bacteria are identified that contain the fragment inserted into plasmid pC6 using, for instance, restriction enzyme analysis.

[1026] Chinese hamster ovary cells lacking an active DHFR gene is used for transfection. Five μg of the expression plasmid pC6 or pC4 is cotransfected with 0.5 μg of the plasmid pSVneo using lipofectin (Felgner et al., supra). The plasmid pSV2-neo contains a dominant selectable marker, the neo gene from Tn5 encoding an enzyme that confers resistance to a group of antibiotics including G418. The cells are seeded in alpha minus MEM supplemented with 1 mg/ml G418. After 2 days, the cells are trypsinized and seeded in hybridoma cloning plates (Greiner, Germany) in alpha minus MEM supplemented with 10, 25, or 50 ng/ml of methotrexate plus 1 mg/ml G418. After about 10-14 days single clones are trypsinized and then seeded in 6-well petri dishes or 10 ml flasks using different concentrations of methotrexate (50 nM, 100 nM, 200 nM, 400 nM, 800 nM). Clones growing at the highest concentrations of methotrexate are then transferred to new 6-well plates containing even higher concentrations of methotrexate (1 μM, 2 μM, 5 μM, 10 mM, 20 mM). The same procedure is repeated until clones are obtained which grow at a concentration of 100-200 μM. Expression of the desired fusion protein is analyzed, for instance, by SDS-PAGE and Western blot or by reversed phase HPLC analysis.

### Example 15

### Multifusion Fusions

[1027] The albumin fusion proteins (e.g., containing a Therapeutic protein (or fragment or variant thereof) fused to albumin (or a fragment or variant thereof)) may additionally be fused to other proteins to generate “multifusion proteins”. These multifusion proteins can be used for a variety of applications. For example, fusion of the albumin fusion proteins of the invention to His-tag, HA-tag, protein A, IgG domains, and maltose binding protein facilitates purification. (See e.g,. EP A 394,827; Traunecker et al., Nature 331:84-86 (1988)). Nuclear localization signals fused to the polypeptides of the present invention can target the protein to a specific subcellular localization, while covalent heterodimer or homodimers can increase or decrease the activity of an albumin fusion protein. Furthermore, the fusion of additional protein sequences to the albumin fusion proteins of the invention may further increase the solubility and/or stability of the fusion protein. The fusion proteins described above can be made using or routinely modifting techniques known in the art and/or by modifying the following protocol, which outlines the fusion of a polypeptide to an IgG molecule.

[1028] Briefly, the human Fc portion of the IgG molecule can be PCR amplified, using primers that span the 5′ and 3′ ends of the sequence described below. These primers also should have convenient restriction enzyme sites that will facilitate cloning into an expression vector, preferably a mammalian or yeast expression vector.

[1029] For example, if pC4 (ATCC Accession No. 209646) is used, the human Fc portion can be ligated into the BamHI cloning site. Note that the 3′ BamHI site should be destroyed. Next, the vector containing the human Fc portion is re-restricted with BamHI, linearizing the vector, and a polynucleotide encoding an albumin fusion protein of the present invention (generateed and isolated using techniques known in the art), is ligated into this BamHI site. Note that the polynucleotide encoding the fusion protein of the invention is cloned without a stop codon, otherwise a Fc containing fusion protein will not be produced.

[1030] If the naturally occurring signal sequence is used to produce the albumin fusion protein of the present invention, pC4 does not need a second signal peptide. Alternatively, if the naturally occurring signal sequence is not used, the vector can be modified to include a heterologous signal sequence. (See, e.g., International Publication No. WO 96/34891.)

[1031] Human IgG Fc Region:

| | |
|---|---|
| GGGATCCGGAGCCCAAATCTTCTGACAAAACTCACACATGCCCACCGTGCCCAGCACCTGAATTCGAGGGTGCACCGTCAGTCT | (SEQ ID NO: 36) |
| TCCTCTTCCCCCCAAAACCCAAGGACACCCTCATGATCTCCCGGACTCCTGAGGTCACATGCGTGGTGGTGGACGTAAGCCACG | |
| AAGACCCTGAGGTCAAGTTCAACTGGTACGTGGACGGCGTGGAGGTGCATAATGCCAAGACAAAGCCGCGGGAGGAGCAGTA | |
| CAACAGCACGTACCGTGTGGTCAGCGTCCTCACCGTCCTGCACCAGGACTGGCTGAATGGCAAGGAGTACAAGTGCAAGGTCT | |
| CCAACAAAGCCCTCCCAACCCCCATCGAGAAAACCATCTCCAAAGCCAAAGGGCAGCCCCGAGAACCACAGGTGTACACCCTG | |
| CCCCCATCCCGGGATGAGCTGACCAAGAACCAGGTCAGCCTGACCTGCCTGGTCAAAGGCTTCTATCCAAGCGACATCGCCGT | |
| GGAGTGGGAGAGCAATGGGCAGCCGGAGAACAACTACAAGACCACGCCTCCCGTGCTGGACTCCGACGGCTCCTTCTTCCTCT | |
| ACAGCAAGCTCACCGTGGACAAGAGCAGGTGGCAGCAGGGGAACGTCTTCTCATGCTCCGTGATGCATGAGGCTCTGCACAAC | |
| CACTACACGCAGAAGAGCCTCTCCCTGTCTCCGGGTAAATGAGTGCGACGGCCGCGACTCTAGAGGAT | |

### Example 16

### Production of an Antibody from an Albumin Fusion Protein

[1032] a) Hybridoma Technology

[1033] Antibodies that bind the albumin fusion proteins of the present invention and portions of the albumin fusion proteins of the present invention (e.g., the Therapeutic protein portion or albumin portion of the fusion protein) can be prepared by a variety of methods. (See, Current Protocols, Chapter 2.) As one example of such methods, a preparation of an albumin fusion protein of the invention or a portion of an albumin fusion protein of the invention is prepared and purified to render it substantially free of natural contaminants. Such a preparation is then introduced into an animal in order to produce polyclonal antisera of greater specific activity.

[1034] Monoclonal antibodies specific for an albumin fusion protein of the invention, or a portion of an albumin fusion protein of the invention, are prepared using hybridoma technology (Kohler et al., Nature 256:495 (1975); Kohler et al., Eur. J. Immunol. 6:511 (1976); Kohler et al., Eur. J. Immunol. 6:292 (1976); Hammerling et al., in: Monoclonal Antibodies and T-Cell Hybridomas, Elsevier, N.Y., pp. 563-681 (1981)). In general, an animal (preferably a mouse) is immunized with an albumin fusion protein of the invention, or a portion of an albumin fusion protein of.the invention. The splenocytes of such mice are extracted and fused with a suitable myeloma cell line. Any suitable myeloma cell line may be employed in accordance with the present invention; however, it is preferable to employ the parent myeloma cell line (SP2O), available from the ATCC. After fusion, the resulting hybridoma cells are selectively maintained in HAT medium, and then cloned by limiting dilution as described by Wands et al. (Gastroenterology 80:225-232 (1981)). The hybridoma cells obtained through such a selection are then assayed to identify clones which secrete antibodies capable of binding an albumin fusion protein of the invention, or a portion of an albumin fusion protein of the invention.

[1035] Alternatively, additional antibodies capable of binding to an albumin fusion protein of the invention, or a portion of an albumin fusion protein of the invention can be produced in a two-step procedure using anti-idiotypic antibodies. Such a method makes use of the fact that antibodies are themselves antigens, and therefore, it is possible to obtain an antibody which binds to a second antibody. In accordance with this method, protein specific antibodies are used to immunize an animal, preferably a mouse. The splenocytes of such an animal are then used to produce hybridoma cells, and the hybridoma cells are screened to identify clones which produce an antibody whose ability to bind to the an albumin fusion protein of the invention (or portion of an albumin fusion protein of the invention)-specific antibody can be blocked by the fusion protein of the invention, or a portion of an albumin fusion protein of the invention. Such antibodies comprise anti-idiotypic antibodies to the fusion protein of the invention (or portion of an albumin fusion protein of the invention)-specific antibody and are used to immunize an animal to induce formation of further fusion protein of the invention (or portion of an albumin fusion protein of the invention)-specific antibodies.

[1036] For in vivo use of antibodies in humans, an antibody is “humanized”. Such antibodies can be produced using genetic constructs derived from hybridoma cells producing the monoclonal antibodies described above. Methods for producing chimeric and humanized antibodies are known in the art and are discussed herein. (See, for review, Morrison, Science 229:1202 (1985); Oi et al., BioTechniques 4:214 (1986); Cabilly et al., U.S. Pat. No. 4,816,567; Taniguchi et al., EP 171496; Morrison et al., EP 173494; Neuberger et al., WO 8601533; Robinson et al., International Publication No. WO 8702671; Boulianne et al., Nature 312:643 (1984); Neuberger et al., Nature 314:268 (1985)).

[1037] b) Isolation of Antibody Fragments Directed Against an Albumin Fusion Protein of the Invention, or a Portion of an Albumin Protein of the Invention From a Library of scFvs

[1038] Naturaly occurring V-genes isolated from human PBLs are constructed into a library of antibody fragments which contain reactivities against an albumin fusion protein of the invention, or a portion of an albumin fusion protein of the invention, to which the donor may or may not have been exposed (see e.g., U.S. Pat. No. 5,885,793 incorporated herein by reference in its entirety).

[1039] Rescue of the Library. A library of scFvs is constructed from the RNA of human PBLs as described in International Publication No. WO 92/01047. To rescue phage displaying antibody fragments, approximately 10⁹ E. coli harboring the phagemid are used to inoculate 50 ml of 2×TY containing 1% glucose and 100 μg/ml of ampicillin (2×TY-AMP-GLU) and grown to an O.D. of 0.8 with shaking. Five ml of this culture is used to inoculate 50 ml of 2×TY-AMP-GLU, 2×108 TU of delta gene 3 helper (M13 delta gene III, see International Publication No. WO 92/01047) are added and the culture incubated at 37° C. for 45 minutes without shaking and then at 37° C. for 45 minutes with shaking. The culture is centrifuged at 4000 r.p.m. for 10 min. and the pellet resuspended in 2 liters of 2×TY containing 100 μg/ml ampicillin and 50 ug/ml kanamycin and grown overnight. Phage are prepared as described in International Publication No. WO 92/01047.

[1040] M13 delta gene III is prepared as follows: M13 delta gene III helper phage does not encode gene III protein, hence the phage(mid) displaying antibody fragments have a greater avidity of binding to antigen. Infectious M13 delta gene III particles are made by growing the helper phage in cells harboring a pUC19 derivative supplying the wild type gene III protein during phage morphogenesis. The culture is incubated for 1 hour at 37° C. without shaking and then for a further hour at 37° C. with shaking. Cells are spun down (IEC-Centra 8,400 r.p.m. for 10 min), resuspended in 300 ml 2×TY broth containing 100 μg ampicillin/ml and 25 μg kanamycin/ml (2×TY-AMP-KAN) and grown overnight, shaking at 37° C. Phage particles are purified and concentrated from the culture medium by two PEG-precipitations (Sambrook et al., 1990), resuspended in 2 ml PBS and passed through a 0.45 μm filter (Minisart NML; Sartorius) to give a final concentration of approximately 10¹³ transducing units/ml (ampicillin-resistant clones).

[1041] Panning of the Library. Immunotubes (Nunc) are coated overnight in PBS with 4 ml of either 100 μg/ml or 10 μg/ml of an albumin fusion protein of the invention, or a portion of an albumin fusion protein of the invention. Tubes are blocked with 2% Marvel-PBS for 2 hours at 37° C. and then washed 3 times in PBS. Approximately 10¹³ TU of phage is applied to the tube and incubated for 30 minutes at room temperature tumbling on an over and under turntable and then left to stand for another 1.5 hours. Tubes are washed 10 times with PBS 0.1% Tween-20 and 10 times with PBS. Phage are eluted by adding 1 ml of 100 mM triethylarnine and rotating 15 minutes on an under and over turntable after which the solution is immediately neutralized with 0.5 ml of 1.0 M Tris-HCl, pH 7.4. Phage are then used to infect 10 ml of mid-log E. coli TG1 by incubating eluted phage with bacteria for 30 minutes at 37° C. The E. coli are then plated on TYE plates containing 1% glucose and 100 μg/ml ampicillin. The resulting bacterial library is then rescued with delta gene 3 helper phage as described above to prepare phage for a subsequent round of selection. This process is then repeated for a total of 4 rounds of affinity purification with tube-washing increased to 20 times with PBS, 0.1% Tween-20 and 20 times with PBS for rounds 3 and 4.

[1042] Characterization of Binders. Eluted phage from the 3rd and 4th rounds of selection are used to infect E. coli HB 2151 and soluble scFv is produced (Marks, et al., 1991) from single colonies for assay. EUSAs are performed with microtitre plates coated with either 10 pg/ml of an albumin fusion protein of the invention, or a portion of an albumin fusion protein of the invention, in 50 mM bicarbonate pH 9.6. Clones positive in ELISA are further characterized by PCR fingerprinting (see, e.g., International Publication No. WO 92/01047) and then by sequencing. These ELISA positive clones may also be further characterized by techniques known in the art, such as, for example, epitope mapping, binding affinity, receptor signal transduction, ability to block or competitively inhibit antibody/antigen binding, and competitive agonistic or antagonistic activity.

### Example 17

### Method of Treatment Using Gene Therapy—Ex Vivo

[1043] One method of gene therapy transplants fibroblasts, which are capable of expressing an albumin fusion protein of the present invention, onto a patient. Generally, fibroblasts are obtained from a subject by skin biopsy. The resulting tissue is placed in tissue-culture medium and separated into small pieces. Small chunks of the tissue are placed on a wet surface of a tissue culture flask, approximately ten pieces are placed in each flask. The flask is turned upside down, closed tight and left at room temperature over night. After 24 hours at room temperature, the flask is inverted and the chunks of tissue remain fixed to the bottom of the flask and fresh media (e.g., Ham's F12 media, with 10% FBS, penicillin and streptomycin) is added. The flasks are then incubated at 37 degree C. for approximately one week.

[1044] At this time, fresh media is added and subsequently changed every several days. After an additional two weeks in culture, a monolayer of fibroblasts emerge. The monolayer is trypsinized and scaled into larger flasks.

[1045] pMV-7 (Kirschmeier, P. T. et al., DNA, 7:219-25 (1988)), flanked by the long terminal repeats of the Moloney murine sarcoma virus, is digested with EcoRI and HindIII and subsequently treated with calf intestinal phosphatase. The linear vector is fractionated on agarose gel and purified, using glass beads.

[1046] Polynucleotides encoding an albumin fusion protein of the invention can be generated using techniques known in the art amplified using PCR primers which correspond to the 5′ and 3′ end sequences and optionally having appropriate restriction sites and initiation/stop codons, if necessary. Preferably, the 5′ primer contains an EcoRI site and the 3′ primer includes a HindIII site. Equal quantities of the Moloney murine sarcoma virus linear backbone and the amplified EcoRI and HindIII fragment are added together, in the presence of T4 DNA ligase. The resulting mixture is maintained under conditions appropriate for ligation of the two fragments. The ligation mixture is then used to transform bacteria HB101, which are then plated onto agar containing kanamycin for the purpose of confirming that the vector has the gene of interest properly inserted.

[1047] The amphotropic pA317 or GP+am12 packaging cells are grown in tissue culture to confluent density in Dulbecco's Modified Eagles Medium (DMEM) with 10% calf serum (CS), penicillin and streptomycin. The MSV vector containing the gene is then added to the media and the packaging cells transduced with the vector. The packaging cells now produce infectious viral particles containing the gene (the packaging cells are now referred to as producer cells).

[1048] Fresh media is added to the transduced producer cells, and subsequently, the media is harvested from a 10 cm plate of confluent producer cells. The spent media, containing the infectious viral particles, is filtered through a millipore filter to remove detached producer cells and this media is then used to infect fibroblast cells. Media is removed from a sub-confluent plate of fibroblasts and quickly replaced with the media from the producer cells. This media is removed and replaced with fresh media. If the titer of virus is high, then virtually all fibroblasts will be infected and no selection is required. If the titer is very low, then it is necessary to use a retroviral vector that has a selectable marker, such as neo or his. Once the fibroblasts have been efficiently infected, the fibroblasts are analyzed to determine whether the albumin fusion protein is produced.

[1049] The engineered fibroblasts are then transplanted onto the host, either alone or after having been grown to confluence on cytodex 3 microcarrier beads.

### Example 18

### Method of Treatment Using Gene Therapy—In Vivo

[1050] Another aspect of the present invention is using in vivo gene therapy methods to treat disorders, diseases and conditions. The gene therapy method relates to the introduction of naked nucleic acid (DNA, RNA, and antisense DNA or RNA) sequences encoding an albumin fusion protein of the invention into an animal. Polynucleotides encoding albumin fusion proteins of the present invention may be operatively linked to (i.e., associated with) a promoter or any other genetic elements necessary for the expression of the polypeptide by the target tissue. Such gene therapy and delivery techniques and methods are known in the art, see, for example, WO90/11092, WO98/11779; U.S. Pat. No. 5,693,622, 5,705,151, 5,580,859; Tabata et al., Cardiovasc. Res. 35(3):470-479 (1997); Chao et al., Pharmacol. Res. 35(6):517-522 (1997); Wolff, Neuromuscul. Disord. 7(5):314-318 (1997); Schwartz et al., Gene Ther. 3(5):405-411 (1996); Tsurumi et al., Circulation 94(12):3281-3290 (1996) (incorporated herein by reference).

[1051] The polynucleotide constructs may be delivered by any method that delivers injectable materials to the cells of an animal, such as, injection into the interstitial space of tissues (heart, muscle, skin, lung, liver, intestine and the like). The polynucleotide constructs can be delivered in a pharmaceutically acceptable liquid or aqueous carrier.

[1052] The term “naked” polynucleotide, DNA or RNA, refers to sequences that are free from any delivery vehicle that acts to assist, promote, or facilitate entry into the cell, including viral sequences, viral particles, liposome formulations, lipofectin or precipitating agents and the like. However, polynucleotides encoding albumin fusion proteins of the present invention may also be delivered in liposome formulations (such as those taught in Felgner P. L. et al. (1995) Ann. NY Acad. Sci. 772:126-139 and Abdallah B. et al. (1995) Biol. Cell 85(1):1-7) which can be prepared by methods well known to those skilled in the art.

[1053] The polynucleotide vector constructs used in the gene therapy method are preferably constructs that will not integrate into the host genome nor will they contain sequences that allow for replication. Any strong promoter known to those skilled in the art can be used for driving the expression of DNA. Unlike other gene therapy techniques, one major advantage of introducing naked nucleic acid sequences into target cells is the transitory nature of the polynucleotide synthesis in the cells. Studies have shown that non-replicating DNA sequences can be introduced into cells to provide production of the desired polypeptide for periods of up to six months.

[1054] The polynucleotide construct can be delivered to the interstitial space of tissues within an animal, including muscle, skin, brain, lung, liver, spleen, bone marrow, thymus, heart, lymph, blood, bone, cartilage, pancreas, kidney, gall bladder, stomach, intestine, testis, ovary, uterus, rectum, nervous system, eye, gland, and connective tissue. Interstitial space of the tissues comprises the intercellular fluid, mucopolysaccharide matrix among the reticular fibers of organ tissues, elastic fibers in the walls of vessels or chambers, collagen fibers of fibrous tissues, or that same matrix within connective tissue ensheathing muscle cells or in the lacunae of bone. It is similarly the space occupied by the plasma of the circulation and the lymph fluid of the lymphatic channels. Delivery to the interstitial space of muscle tissue is preferred for the reasons discussed below. They may be conveniently delivered by injection into the tissues comprising these cells. They are preferably delivered to and expressed in persistent, non-dividing cells which are differentiated, although delivery and expression may be achieved in non-differentiated or less completely differentiated cells, such as, for example, stem cells of blood or skin fibroblasts. In vivo muscle cells are particularly competent in their ability to take up and express polynucleotides.

[1055] For the naked polynucleotide injection, an effective dosage amount of DNA or RNA will be in the range of from about 0.05 g/kg body weight to about 50 mg/kg body weight. Preferably the dosage will be from about 0.005 mg/kg to about 20 mg/kg and more preferably from about 0.05 mg/kg to about 5 mg/kg. Of course, as the artisan of ordinary skill will appreciate, this dosage will vary according to the tissue site of injection. The appropriate and effective dosage of nucleic acid sequence can readily be determined by those of ordinary skill in the art and may depend on the condition being treated and the route of administration. The preferred route of administration is by the parenteral route of injection into the interstitial space of tissues. However, other parenteral routes may also be used, such as, inhalation of an aerosol formulation particularly for delivery to lungs or bronchial tissues, throat or mucous membranes of the nose. In addition, naked polynucleotide constructs can be delivered to arteries during angioplasty by the catheter used in the procedure.

[1056] The dose response effects of injected polynucleotide in muscle in vivo is determined as follows. Suitable template DNA for production of mRNA coding for polypeptide of the present invention is prepared in accordance with a standard recombinant DNA methodology. The template DNA, which may be either circular or linear, is either used as naked DNA or complexed with liposomes. The quadriceps muscles of mice are then injected with various amounts of the template DNA.

[1057] Five to six week old female and male Balb/C mice are anesthetized by intraperitoneal injection with 0.3 ml of 2.5% Avertin. A 1.5 cm incision is made on the anterior thigh, and the quadriceps muscle is directly visualized. The template DNA is injected in 0.1 ml of carrier in a 1 cc syringe through a 27 gauge needle over one minute, approximately 0.5 cm from the distal insertion site of the muscle into the knee and about 0.2 cm deep. A suture is placed over the injection site for future localization, and the skin is closed with stainless steel clips.

[1058] After an appropriate incubation time (e.g., 7 days) muscle extracts are prepared by excising the entire quadriceps. Every fifth 15 um cross-section of the individual quadriceps muscles is histochemically stained for protein expression. A time course for fusion protein expression may be done in a similar fashion except that quadriceps from different mice are harvested at different times. Persistence of DNA in muscle following injection may be determined by Southern blot analysis after preparing total cellular DNA and HIRT supernatants from injected and control mice. The results of the above experimentation in mice can be used to extrapolate proper dosages and other treatment parameters in humans and other animals using naked DNA.

### Example 19

### Transgenic Animals

[1059] The albumin fusion proteins of the invention can also be expressed in transgenic animals. Animals of any species, including, but not limited to, mice, rats, rabbits, hamsters, guinea pigs, pigs, micro-pigs, goats, sheep, cows and non-human primates, e.g., baboons, monkeys, and chimpanzees may be used to generate transgenic animals. In a specific embodiment, techniques described herein or otherwise known in the art, are used to express fusion proteins of the invention in humans, as part of a gene therapy protocol.

[1060] Any technique known in the art may be used to introduce the polynucleotides encoding the albumin fusion proteins of the invention into animals to produce the founder lines of transgenic animals. Such techniques include, but are not limited to, pronuclear microinjection (Paterson et al., Appl. Microbiol. Biotechnol. 40:691-698 (1994); Carver et al., Biotechnology (NY) 11:1263-1270 (1993); Wright et al., Biotechnology (NY) 9:830-834 (1991); and Hoppe et al., U.S. Pat. No. 4,873,191 (1989)); retrovirus mediated gene transfer into germ lines (Van der Puten et al., Proc. Natl. Acad. Sci., USA 82:6148-6152 (1985)), blastocysts or embryos; gene targeting in embryonic stem cells (Thompson et al., Cell 56:313-321 (1989)); electroporation of cells or embryos (Lo, 1983, Mol Cell. Biol. 3:1803-1814 (1983)); introduction of the polynucleotides of the invention using a gene gun (see, e.g., Ulmer et al., Science 259:1745 (1993); introducing nucleic acid constructs into embryonic pleuripotent stem cells and transferring the stem cells back into the blastocyst; and sperm-mediated gene transfer (Lavitrano et al., Cell 57:717-723 (1989); etc. For a review of such techniques, see Gordon, “Transgenic Animals,” Intl. Rev. Cytol. 115:171-229 (1989), which is incorporated by reference herein in its entirety.

[1061] Any technique known in the art may be used to produce transgenic clones containing polynucleotides encoding albumin fusion proteins of the invention, for example, nuclear transfer into enucleated oocytes of nuclei from cultured embryonic, fetal, or adult cells induced to quiescence (Campell et al., Nature 380:64-66 (1996); Wilmut et al., Nature 385:810-813 (1997)).

[1062] The present invention provides for transgenic animals that carry the polynucleotides encoding the albumin fusion proteins of the invention in all their cells, as well as animals which carry these polynucleotides in some, but not all their cells, i.e., mosaic animals or chimeric. The transgene may be integrated as a single transgene or as multiple copies such as in concatamers, e.g., head-to-head tandems or head-to-tail tandems. The transgene may also be selectively introduced into and activated in a particular cell type by following, for example, the teaching of Lasko et al. (Lasko et al., Proc. Natl. Acad. Sci. USA 89:6232-6236 (1992)). The regulatory sequences required for such a cell-type specific activation will depend upon the particular cell type of interest, and will be apparent to those of skill in the art. When it is desired that the polynucleotide encoding the fusion protein of the invention be integrated into the chromosomal site of the endogenous gene corresponding to the Therapeutic protein portion or ablumin portion of the fusion protein of the invention, gene targeting is preferred. Briefly, when such a technique is to be utilized, vectors containing some nucleotide sequences homologous to the endogenous gene are designed for the purpose of integrating, via homologous recombination with chromosomal sequences, into and disrupting the function of the nucleotide sequence of the endogenous gene. The transgene may also be selectively introduced into a particular cell type, thus inactivating the endogenous gene in only that cell type, by following, for example, the teaching of Gu et al. (Gu et al., Science 265:103-106 (1994)). The regulatory sequences required for such a cell-type specific inactivation will depend upon the particular cell type of interest, and will be apparent to those of skill in the art.

[1063] Once transgenic animals have been generated, the expression of the recombinant gene may be assayed utilizing standard techniques. Initial screening may be accomplished by Southern blot analysis or PCR techniques to analyze animal tissues to verify that integration of the polynucleotide encoding the fsuion protien of the invention has taken place. The level of mRNA expression of the polynucleotide encoding the fusion protein of the invention in the tissues of the transgenic animals may also be assessed using techniques which include, but are not limited to, Northern blot analysis of tissue samples obtained from the animal, in situ hybridization analysis, and reverse transcriptase-PCR (rt-PCR). Samples of fusion protein-expressing tissue may also be evaluated immunocytochemically or immunohistochemically using antibodies specific for the fusion protein.

[1064] Once the founder animals are produced, they may be bred, inbred, outbred, or crossbred to produce colonies of the particular animal. Examples of such breeding strategies include, but are not limited to: outbreeding of founder animals with more than one integration site in order to establish separate lines; inbreeding of separate lines in order to produce compound transgenics that express the transgene at higher levels because of the effects of additive expression of each transgene; crossing of heterozygous transgenic animals to produce animals homozygous for a given integration site in order to both augment expression and eliminate the need for screening of animals by DNA analysis; crossing of separate homozygous lines to produce compound heterozygous or homozygous lines; and breeding to place the transgene (i.e., polynucleotide encoding an albumin fusion protein of the invention) on a distinct background that is appropriate for an experimental model of interest.

[1065] Transgenic animals of the invention have uses which include, but are not limited to, animal model systems useful in elaborating the biological function of fusion proteins of the invention and the Therapeutic protein and/or albumin component of the fusion protein of the invention, studying conditions and/or disorders associated with aberrant expression, and in screening for compounds effective in ameliorating such conditions and/or disorders.

### Example 20

### Assays Detecting Stimulation or Inhibition of B cell Proliferation and Differentiation

[1066] Generation of functional humoral immune responses requires both soluble and cognate signaling between B-lineage cells and their microenvironment. Signals may impart a positive stimulus that allows a B-lineage cell to continue its programmed development, or a negative stimulus that instructs the cell to arrest its current developmental pathway. To date, numerous stimulatory and inhibitory signals have been found to influence B cell responsiveness including IL-2, IL4, IL-5, L-6, IL-7, IL10, IL-13, IL-14 and IL-15. Interestingly, these signals are by themselves weak effectors but can, in combination with various co-stimulatory proteins, induce activation, proliferation, differentiation, homing, tolerance and death among B cell populations.

[1067] One of the best studied classes of B-cell co-stimulatory proteins is the TNF-superfamily. Within this family CD40, CD27, and CD30 along with their respective ligands CD154, CD70, and CD153 have been found to regulate a variety of immune responses. Assays which allow for the detection and/or observation of the proliferation and differentiation of these B-cell populations and their precursors are valuable tools in determining the effects various proteins may have on these B-cell populations in terms of proliferation and differentiation. Listed below are two assays designed to allow for the detection of the differentiation, proliferation, or inhibition of B-cell populations and their precursors.

[1068] In Vitro Assay—Albumin fusion proteins of the invention (including fusion proteins containing fragments or variants of Therapeutic proteins and/or albumin or fragments or variants of albumin) can be assessed for its ability to induce activation, proliferation, differentiation or inhibition and/or death in B-cell populations and their precursors. The activity of an albumin fusion protein of the invention on purified human tonsillar B cells, measured qualitatively over the dose range from 0.1 to 10,000 ng/mL, is assessed in a standard B-lymphocyte co-stimulation assay in which purified tonsillar B cells are cultured in the presence of either formalin-fixed Staphylococcus aureus Cowan I (SAC) or immobilized anti-human IgM antibody as the priming agent. Second signals such as IL-2 and IL-15 synergize with SAC and IgM crosslinking to elicit B cell proliferation as measured by tritiated-thymidine incorporation. Novel synergizing agents can be readily identified using this assay. The assay involves isolating human tonsillar B cells by magnetic bead (MACS) depletion of CD3-positive cells. The resulting cell population is greater than 95% B cells as assessed by expression of CD45R(B220).

[1069] Various dilutions of each sample are placed into individual wells of a 96-well plate to which are added 10⁵ B-cells suspended in culture medium (RPMI 1640 containing 10% FBS, 5×10⁻⁵M 2ME, 100 U/ml penicillin, 10 ug/ml streptomycin, and 10⁻⁵ dilution of SAC) in a total volume of 150 ul. Proliferation or inhibition is quantitated by a 20 h pulse (1 uCi/well) with 3H-thymidine (6.7 Ci/mM) beginning 72 h post factor addition. The positive and negative controls are IL2 and medium respectively.

[1070] In vivo Assay—BALB/c mice are injected (i.p.) twice per day with buffer only, or 2 mg/Kg of an albumin fusion protein of the invention (including fusion proteins containing fragments or variants of Therapeutic proteins and/or albumin or fragments or variants of albumin). Mice receive this treatment for 4 consecutive days, at which time they are sacrificed and various tissues and serum collected for analyses. Comparison of H&E sections from normal spleens and spleens treated with the albumin fusion protein of the invention identify the results of the activity of the fusion protein on spleen cells, such as the diffusion of peri-arterial lymphatic sheaths, and/or significant increases in the nucleated cellularity of the red pulp regions, which may indicate the activation of the differentiation and proliferation of B-cell populations. Immunohistochemical studies using a B cell marker, anti-CD45R(B220), are used to determine whether any physiological changes to splenic cells, such as splenic disorganization, are due to increased B-cell representation within loosely defined B-cell zones that infiltrate established T-cell regions.

[1071] Flow cytometric analyses of the spleens from mice treated with the albumin fusion protein is used to indicate whether the albumin fusion protein specifically increases the proportion of ThB+, CD45R(B220)dull B cells over that which is observed in control mice.

[1072] Likewise, a predicted consequence of increased mature B-cell representation in vivo is a relative increase in serum Ig titers. Accordingly, serum IgM and IgA levels are compared between buffer and fusion protein treated mice.

[1073] The studies described in this example tested activity of fusion proteins of the invention. However, one skilled in the art could easily modify the exemplified studies to test the activity of fusion proteins and polynucleotides of the invention (e.g., gene therapy).

### Example 21

### T Cell Proliferation Assay

[1074] A CD3-induced proliferation assay is performed on PBMCs and is measured by the uptake of ³H-thymidine. The assay is performed as follows. Ninety-six well plates are coated with 100 μl/well of mAb to CD3 (HIT3a, Pharmingen) or isotype-matched control mAb (B33.1) overnight at 4 degrees C. (1 μg/ml in 0.05M bicarbonate buffer, pH 9.5), then washed three times with PBS. PBMC are isolated by F/H gradient centrifugation from human peripheral blood and added to quadruplicate wells (5×10⁴/well) of mAb coated plates in RPMI containing 10% FCS and P/S in the presence of varying concentrations of an albumin fusion protein of the invention (including fusion proteins containing fragments or variants of Therapeutic proteins and/or albumin or fragments or variants of albumin) (total volume 200 ul). Relevant protein buffer and medium alone are controls. After 48 hr. culture at 37 degrees C., plates are spun for 2 min. at 1000 rpm and 100 μl of supernatant is removed and stored −20 degrees C. for measurement of IL-2 (or other cytokines) if effect on proliferation is observed. Wells are supplemented with 100 ul of medium containing 0.5 uCi of ³H-thymidine and cultured at 37 degrees C. for 18-24 hr. Wells are harvested and incorporation of ³H-thymidine used as a measure of proliferation. Anti-CD3 alone is the positive control for proliferation. IL-2 (100 U/ml) is also used as a control which enhances proliferation. Control antibody which does not induce proliferation of T cells is used as the negative control for the effects of fusion proteins of the invention.

[1075] The studies described in this example tested activity of fusion proteins of the invention. However, one skilled in the art could easily modify the exemplified studies to test the activity of fusion proteins or polynucleotides of the invention (e.g., gene therapy).

### Example 22

### Effect of Fusion Proteins of the Invention on the Expression of MHC Class II, Costimulatory and Adhesion Molecules and Cell Differentiation of Monocytes and Monocyte-Derived Human Dendritic Cells

[1076] Dendritic cells are generated by the expansion of proliferating precursors found in the peripheral blood: adherent PBMC or elutriated monocytic fractions are cultured for 7-10 days with GM-CSF (50 ng/ml) and IL-4 (20 ng/ml). These dendritic cells have the characteristic phenotype of immature cells (expression of CD1, CD80, CD86, CD40 and MHC class II antigens). Treatment with activating factors, such as TNF-α, causes a rapid change in surface phenotype (increased expression of MHC class I and II, costimulatory and adhesion molecules, downregulation of FCγRII, upregulation of CD83). These changes correlate with increased antigen-presenting capacity and with functional maturation of the dendritic cells.

[1077] FACS analysis of surface antigens is performed as follows. Cells are treated 1-3 days with increasing concentrations of an albumin fusion protein of the invention or LPS (positive control), washed with PBS containing 1% BSA and 0.02 mM sodium azide, and then incubated with 1:20 dilution of appropriate FITC- or PE-labeled monoclonal antibodies for 30 minutes at 4 degrees C. After an additional wash, the labeled cells are analyzed by flow cytometry on a FACScan (Becton Dickinson).

[1078] Effect on the production of cytokines. Cytokines generated by dendritic cells, in particular IL-12, are important in the initiation of T-cell dependent immune responses. IL-12 strongly influences the development of Thl helper T-cell immune response, and induces cytotoxic T and NK cell function. An EUSA is used to measure the L-12 release as follows. Dendritic cells (10⁶/ml) are treated with increasing concentrations of an albumin fusion protein of the invention for 24 hours. LPS (100 ng/ml) is added to the cell culture as positive control. Supernatants from the cell cultures are then collected and analyzed for IL-12 content using commercial ELISA kit (e.g., R & D Systems (Minneapolis, Minn.)). The standard protocols provided with the kits are used.

[1079] Effect on the expression of MHC Class II, costimulatory and adhesion molecules. Three major families of cell surface antigens can be identified on monocytes: adhesion molecules, molecules involved in antigen presentation, and Fc receptor. Modulation of the expression of MHC class II antigens and other costimulatory molecules, such as B7 and ICAM-1, may result in changes in the antigen presenting capacity of monocytes and ability to induce T cell activation. Increased expression of Fc receptors may correlate with improved monocyte cytotoxic activity, cytokine release and phagocytosis.

[1080] FACS analysis is used to examine the surface antigens as follows. Monocytes are treated 1-5 days with increasing concentrations of an albumin fusion protein of the invention or LPS (positive control), washed with PBS containing 1% BSA and 0.02 mM sodium azide, and then incubated with 1:20 dilution of appropriate FITC- or PE-labeled monoclonal antibodies for 30 minutes at 4 degrees C. After an additional wash, the labeled cells are analyzed by flow cytometry on a FACScan (Becton Dickinson).

[1081] Monocyte activation and/or increased survival. Assays for molecules that activate (or alternatively, inactivate) monocytes and/or increase monocyte survival (or alternatively, decrease monocyte survival) are known in the art and may routinely be applied to determine whether a molecule of the invention functions as an inhibitor or activator of monocytes. Albumin fusion proteins of the invention can be screened using the three assays described below. For each of these assays, Peripheral blood mononuclear cells (PBMC) are purified from single donor leukopacks (American Red Cross, Baltimore, Md.) by centrifugation through a Histopaque gradient (Sigma). Monocytes are isolated from PBMC by counterflow centrifugal elutriation.

[1082] Monocyte Survival Assay. Human peripheral blood monocytes progressively lose viability when cultured in absence of serum or other stimuli. Their death results from intemally regulated processes (apoptosis). Addition to the culture of activating factors, such as TNF-alpha dramatically improves cell survival and prevents DNA fragmentation. Propidium iodide (PI) staining is used to measure apoptosis as follows. Monocytes are cultured for 48 hours in polypropylene tubes in serum-free medium (positive control), in the presence of 100 ng/ml TNF-alpha (negative control), and in the presence of varying concentrations of the fusion protein to be tested. Cells are suspended at a concentration of 2×10⁶/ml in PBS containing PI at a final concentration of 5 μg/ml, and then incubated at room temperature for 5 minutes before FACScan analysis. PI uptake has been demonstrated to correlate with DNA fragmentation in this experimental paradigm.

[1083] Effect on cytokine release. An important function of monocytes/macrophages is their regulatory activity on other cellular populations of the immune system through the release of cytokines after stimulation. An ELISA to measure cytokine release is performed as follows. Human monocytes are incubated at a density of 5×10⁵ cells/ml with increasing concentrations of an albumin fusion protein of the invention and under the same conditions, but in the absence of the fusion protein. For IL-12 production, the cells are primed overnight with IFN (100 U/ml) in the presence of the fusion protein. LPS (10 ng/ml) is then added. Conditioned media are collected after 24 h and kept frozen until use. Measurement of TNF-alpha, IL-10, MCP-1 and IL-8 is then performed using a commercially available ELISA kit (e.g., R & D Systems (Minneapolis, Minn.)) and applying the standard protocols provided with the kit.

[1084] Oxidative burst. Purified monocytes are plated in 96-w plate at 2-1×10⁵ cell/well. Increasing concentrations of an albumin fusion protein of the invention are added to the wells in a total volume of 0.2 ml culture medium (RPMI 1640+10% FCS, glutamine and antibiotics). After 3 days incubation, the plates are centrifuged and the medium is removed from the wells. To the macrophage monolayers, 0.2 ml per well of phenol red solution (140 mM NaCl, 10 mM potassium phosphate buffer pH 7.0, 5.5 mM dextrose, 0.56 mM phenol red and 19 U/ml of HRPO) is added, together with the stimulant (200 nM PMA). The plates are incubated at 37° C. for 2 hours and the reaction is stopped by adding 20 μl 1N NaOH per well. The absorbance is read at 610 nm. To calculate the amount of H₂O₂ produced by the macrophages, a standard curve of a H₂O₂ solution of known molarity is performed for each experiment.

[1085] The studies described in this example tested activity of fusion proteins of the invention. However, one skilled in the art could easily modify the exemplified studies to test the activity of fusion proteins or polynucleotides of the invention (e.g., gene therapy).

### Example 23

### Biological Effects of Fusion Proteins of the Invention

[1086] Astrocyte and Neuronal Assays

[1087] Albumin fusion proteins of the invention can be tested for activity in promoting the survival, neurite outgrowth, or phenotypic differentiation of cortical neuronal cells and for inducing the proliferation of glial fibrillary acidic protein immunopositive cells, astrocytes. The selection of cortical cells for the bioassay is based on the prevalent expression of FGF-1 and FGF-2 in cortical structures and on the previously reported enhancement of cortical neuronal survival resulting from FGF-2 treatment. A thymidine incorporation assay, for example, can be used to elucidate an albumin fusion protein of the invention's activity on these cells.

[1088] Moreover, previous reports describing the biological effects of FGF-2 (basic FGF) on cortical or hippocampal neurons in vitro have demonstrated increases in both neuron survival and neurite outgrowth (Walicke et al., “Fibroblast growth factor promotes survival of dissociated hippocampal neurons and enhances neurite extension.” Proc. Natl. Acad. Sci. USA 83:3012-3016. (1986), assay herein incorporated by reference in its entirety). However, reports from experiments done on PC-12 cells suggest that these two responses are not necessarily synonymous and may depend on not only which FGF is being tested but also on which receptor(s) are expressed on the target cells. Using the primary cortical neuronal culture paradigm, the ability of an albumin fusion protein of the invention to induce neurite outgrowth can be compared to the response achieved with FGF-2 using, for example, a thymidine incorporation assay.

[1089] Fibroblast and Endothelial Cell Assays

[1090] Human lung fibroblasts are obtained from Clonetics (San Diego, Calif.) and maintained in growth media from Clonetics. Dermal microvascular endothelial cells are obtained from Cell Applications (San Diego, Calif.). For proliferation assays, the human lung fibroblasts and dermal microvascular endothelial cells can be cultured at 5,000 cells/well in a 96-well plate for one day in growth medium. The cells are then incubated for one day in 0.1% BSA basal medium. After replacing the medium with fresh 0.1% BSA medium, the cells are incubated with the test fusion protein of the invention proteins for 3 days. Alamar Blue (Alamar Biosciences, Sacramento, Calif.) is added to each well to a final concentration of 10%. The cells are incubated for 4 hr. Cell viability is measured by reading in a CytoFluor fluorescence reader. For the PGE₂ assays, the human lung fibroblasts are cultured at 5,000 cells/well in a 96-well plate for one day. After a medium change to 0.1% BSA basal medium, the cells are incubated with FGF-2 or fusion protein of the invention with or without IL-loa for 24 hours. The supernatants are collected and assayed for PGE₂ by EIA kit (Cayman, Ann Arbor, Mich.). For the IL-6 assays, the human lung fibroblasts are cultured at 5,000 cells/well in a 96-well plate for one day. After a medium change to 0.1% BSA basal medium, the cells are incubated with FGF-2 or with or without an albumin fusion protein of the invention and/or IL-1α for 24 hours. The supernatants are collected and assayed for L-6 by ELISA kit (Endogen, Cambridge, Mass.).

[1091] Human lung fibroblasts are cultured with FGF-2 or an albumin fusion protein of the invention for 3 days in basal medium before the addition of Alamar Blue to assess effects on growth of the fibroblasts. FGF-2 should show a stimulation at 10-2500 ng/ml which can be used to compare stimulation with the fusion protein of the invention.

[1092] Cell Proliferation Based on [3H]Thymidine Incorporation

[1093] The following [3H]Thymidine incorporation assay can be used to measure the effect of a Therapeutic proteins, e.g. growth factor proteins, on the proliferation of cells such as fibroblast cells, epithelial cells or immature muscle cells.

[1094] Sub-confluent cultures are arrested in G1 phase by an 18 h incubation in serum-free medium. Therapeutic proteins are then added for 24 h and during the last 4 h, the cultures are labeled with [3H]thymidine, at a final concentration of 0.33 μM (25 Ci/mmol, Amersham, Arlington Heights, Ill.). The incorporated [3H]thymidine is precipitated with ice-cold 10% trichloroacetic acid for 24 h. Subsequently, the cells are rinsed sequentially with ice-cold 10% trichloroacetic acid and then with ice-cold water. Following lysis in 0.5 M NaOH, the lysates and PBS rinses (500 ml) are pooled, and the amount of radioactivity is measured.

[1095] Parkinson Models.

[1096] The loss of motor function in Parkinson's disease is attributed to a deficiency of striatal dopamine resulting from the degeneration of the nigrostriatal dopaminergic projection neurons. An animal model for Parkinson's that has been extensively characterized involves the systemic administration of 1-methyl-4-phenyl 1,2,3,6-tetrahydropyridine (MPTP). In the CNS, MPTP is taken-up by astrocytes and catabolized by monoamine oxidase B to 1-methyl-4-phenyl pyridine (MPP⁺) and released. Subsequently, MPP⁺ is actively accumulated in dopaminergic neurons by the high-affinity reuptake transporter for dopamine. MPP⁺ is then concentrated in mitochondria by the electrochemical gradient and selectively inbibits nicotidamide adenine disphosphate: ubiquinone oxidoreductionase (complex I), thereby interfering with electron transport and eventually generating oxygen radicals.

[1097] It has been demonstrated in tissue culture paradigms that FGF-2 (basic FGF) has trophic activity towards nigral dopaminergic neurons (Ferrari et al., Dev. Biol. 1989). Recently, Dr. Unsicker's group has demonstrated that administering FGF-2 in gel foam implants in the striatum results in the near complete protection of nigral dopaminergic neurons from the toxicity associated with MPTP exposure (Otto and Unsicker, J. Neuroscience, 1990).

[1098] Based on the data with FGF-2, an albumin fusion protein of the invention can be evaluated to determine whether it has an action similar to that of FGF-2 in enhancing dopaminergic neuronal survival in vitro and it can also be tested in vivo for protection of dopaminergic neurons in the striatum from the damage associated with MPTP treatment. The potential effect of an albumin fusion protein of the invention is first examined in vitro in a dopaminergic neuronal cell culture paradigm. The cultures are prepared by dissecting the midbrain floor plate from gestation day 14 Wistar rat embryos. The tissue is dissociated with trypsin and seeded at a density of 200,000 cells/cm² on polyorthinine-laminin coated glass coverslips. The cells are maintained in Dulbecco's Modified Eagle's medium and F12 medium containing hormonal supplements (N1). The cultures are fixed with paraformaldehyde after 8 days in vitro and are processed for tyrosine hydroxylase, a specific marker for dopaminergic neurons, immunohistochemical staining. Dissociated cell cultures are prepared from embryonic rats. The culture medium is changed every third day and the factors are also added at that time.

[1099] Since the dopaminergic neurons are isolated from animals at gestation day 14, a developmental time which is past the stage when the dopaminergic precursor cells are proliferating, an increase in the number of tyrosine hydroxylase immunopositive neurons would represent an increase in the number of dopaminergic neurons surviving in vitro. Therefore, if a therapeutic protein of the invention acts to prolong the survival of dopaminergic neurons, it would suggest that the fusion protein may be involved in Parkinson's Disease.

[1100] The studies described in this example tested activity of albumin fusion proteins of the invention. However, one skilled in the art could easily modify the exemplified studies to test the activity of fusion proteins and polynucleotides of the invention (e.g., gene therapy).

### Example 24

### The Effect of Albumin Fusion Proteins of the Invention on the Growth of Vascular Endothelial Cells

[1101] On day 1, human umbilical vein endothelial cells (HUVEC) are seeded at 2-5xI0⁴ cells/35 m

[1102] On day 1, human umbilical vein endothelial cells (HUVEC) are seeded at 2-5×10⁴ cells/35 mm dish density in M199 medium containing 4% fetal bovine serum (FBS), 16 units/ml heparin, and 50 units/ml endothelial cell growth supplements (ECGS, Biotechnique, Inc.). On day 2, the medium is replaced with M199 containing 10% FBS, 8 units/ml heparin. An albumin fusion protein of the invention, and positive controls, such as VEGF and basic FGF (bFGF) are added, at varying concentrations. On days 4 and 6, the medium is replaced. On day 8, cell number is determined with a Coulter Counter.

[1103] An increase in the number of HUVEC cells indicates that the fusion protein may proliferate vascular endothelial cells, while a decrease in the number of HUVEC cells indicates that the fusion protein inhibits vascular endothelial cells.

[1104] The studies described in this example tested activity of an albumin fusion protein of the invention. However, one skilled in the art could easily modify the exemplified studies to test the activity of a fusion protiem and polynucleotides of the invention.

### Example 25

### Rat Corneal Wound Healing Model

[1105] This animal model shows the effect of an albumin fusion protein of the invention on neovascularization. The experimental protocol includes: Making a 1-1.5 mm long incision from the center of cornea into the stromal layer. Iriserting a spatula below the lip of the incision facing the outer corner of the eye. Making a pocket (its base is 1-1.5 mm form the edge of the eye). Positioning a pellet, containing 50 ng-5 ug of an albumin fusion protein of the invention, within the pocket.

[1106] Treatment with an an albumin fusion protein of the invention can also be applied topically to the corneal wounds in a dosage range of 20 mg-500 mg (daily treatment for five days).

[1107] The studies described in this example test the activity of an albumin fusion protein of the invention. However, one skilled in the art could easily modify the exemplified studies to test the activity of fusion proteins and polynucleotides of the invention (e.g., gene therapy).

### Example 26

### Diabetic Mouse and Glucocorticoid-Impaired Wound Healing Models

[1108] Diabetic db+/db+ Mouse Model.

[1109] To demonstrate that an albumin fusion protein of the invention accelerates the healing process, the genetically diabetic mouse model of wound healing is used. The full thickness wound healing model in the db+/db+ mouse is a well characterized, clinically relevant and reproducible model of impaired wound healing. Healing of the diabetic wound is dependent on formation of granulation tissue and re-epithelialization rather than contraction (Gartner, M. H. et al., J. Surg. Res. 52:389 (1992); Greenhalgh, D. G. et al., Am. J. Pathol. 136:1235 (1990)).

[1110] The diabetic animals have many of the characteristic features observed in Type II diabetes mellitus. Homozygous (db+/db+) mice are obese in comparison to their normal heterozygous (db+/+m) linermates. Mutant diabetic (db+/db+) mice have a single autosomal recessive mutation on chromosome 4 (db+) (Coleman et al. Proc. Natl. Acad. Sci. USA 77:283-293 (1982)). Animals show polyphagia, polydipsia and polyuria. Mutant diabetic mice (db+/db+) have elevated blood glucose, increased or normal insulin levels, and suppressed cell-mediated immunity (Mandel et al., J. Immunol. 120:1375 (1978); Debray-Sachs, M. et al., Clin. Exp. Immunol. 51(1):1-7 (1983); Leiter et al., Am. J. of Pathol. 114:46-55 (1985)). Peripheral neuropathy, myocardial complications, and microvascular lesions, basement membrane thickening and glomerular filtration abnormalities have been described in these animals (Norido, F. et al., Exp. Neurol. 83(2):221-232 (1984); Robertson et al., Diabetes 29(1):60-67 (1980); Giacomelli et al., Lab Invest. 40(4):460-473 (1979); Coleman, D. L. Diabetes 31 (Suppl):1-6 (1982)). These homozygous diabetic mice develop hyperglycemia that is resistant to insulin analogous to human type II diabetes (Mandel et al., J. Immunol. 120:1375-1377 (1978)).

[1111] The characteristics observed in these animals suggests that healing in this model may be similar to the healing observed in human diabetes (Greenhalgh, et al., Am. J. of Pathol. 136:1235-1246 (1990)).

[1112] Genetically diabetic female C57BLIKsJ (db+/db+) mice and their non-diabetic (db+/+m) heterozygous littermates are used in this study (Jackson Laboratories). The animals are purchased at 6 weeks of age and are 8 weeks old at the beginning of the study. Animals are individually housed and received food and water ad libitum. All manipulations are performed using aseptic techniques. The experiments are conducted according to the rules and guidelines of Human Genome Sciences, Inc. Institutional Animal Care and Use Committee and the Guidelines for the Care and Use of Laboratory Animals.

[1113] Wounding protocol is performed according to previously reported methods (Tsuboi, R. and Rifkin, D. B., J. Exp. Med. 172:245-251 (1990)). Briefly, on the day of wounding, animals are anesthetized with an intraperitoneal injection of Avertin (0.01 mg/mL), 2,2,2-tribromoethanol and 2-methyl-2-butanol dissolved in deionized water. The dorsal region of the animal is shaved and the skin washed with 70% ethanol solution and iodine. The surgical area is dried with sterile gauze prior to wounding. An 8 mm full-thickness wound is then created using a Keyes tissue punch. Immediately following wounding, the surrounding skin is gently stretched to eliminate wound expansion. The wounds are left open for the duration of the experiment. Application of the treatment is given topically for 5 consecutive days commencing on the day of wounding. Prior to treatment, wounds are gently cleansed with sterile saline and gauze sponges.

[1114] Wounds are visually examined and photographed at a fixed distance at the day of surgery and at two day intervals thereafter. Wound closure is determined by daily measurement on days 1-5 and on day 8. Wounds are measured horizontally and vertically using a calibrated Jameson caliper. Wounds are considered healed if granulation tissue is no longer visible and the wound is covered by a continuous epithelium.

[1115] An albumin fusion protein of the invention is administered using at a range different doses, from 4 mg to 500 mg per wound per day for 8 days in vehicle. Vehicle control groups received 50 mL of vehicle solution.

[1116] Animals are euthanized on day 8 with an intraperitoneal injection of sodium pentobarbital (300 mg/kg). The wounds and surrounding skin are then harvested for histology and immunohistochemistry. Tissue specimens are placed in 10% neutral buffered formalin in tissue cassettes between biopsy sponges for further processing.

[1117] Three groups of 10 animals each (5 diabetic and 5 non-diabetic controls) are evaluated: 1) Vehicle control, 2) untreated group, and 3) treated group.

[1118] Wound closure is analyzed by measuring the area in the vertical and horizontal axis and obtaining the total square area of the wound. Contraction is then estimated by establishing the differences between the initial wound area (day 0) and that of post treatment (day 8). The wound area on day 1 is 64 mm², the corresponding size of the dermal punch. Calculations are made using the following formula:
[Open area on day 8]−[Open area on day 1]/[Open area on day 1]

[1119] Specimens are fixed in 10% buffered formalin and paraffin embedded blocks are sectioned perpendicular to the wound surface (5 mm) and cut using a Reichert-Jung microtome. Routine hematoxylin-eosin (H&E) staining is performed on cross-sections of bisected wounds. Histologic examination of the wounds are used to assess whether the healing process and the morphologic appearance of the repaired skin is altered by treatment with an albumin fusion protein of the invention. This assessment included verification of the presence of cell accumulation, inflammatory cells, capillaries, fibroblasts, re-epithelialization and epidermal maturity (Greenhalgh, D. G. et al., Am. J. Pathol. 136:1235 (1990)). A calibrated lens micrometer is used by a blinded observer.

[1120] Tissue sections are also stained immunohistochemically with a polyclonal rabbit anti-human keratin antibody using ABC Elite detection system. Human skin is used as a positive tissue control while non-immune IgG is used as a negative control. Keratinocyte growth is determined by evaluating the extent of reepithelialization of the wound using a calibrated lens micrometer.

[1121] Proliferating cell nuclear antigen/cyclin (PCNA) in skin specimens is demonstrated by using anti-PCNA antibody (1:50) with an ABC Elite detection system. Human colon cancer served as a positive tissue control and human brain tissue is used as a negative tissue control. Each specimen included a section with omission of the primary antibody and substitution with non-immune mouse IgG. Ranking of these sections is based on the extent of proliferation on a scale of 0-8, the lower side of the scale reflecting slight proliferation to the higher side reflecting intense proliferation.

[1122] Experimental data are analyzed using an unpaired t test. A p value of <0.05 is considered significant.

[1123] Steroid Impaired Rat Model

[1124] The inhibition of wound healing by steroids has been well documented in various in vitro and in vivo systems (Wahl, Glucocorticoids and Wound healing. In: Anti-Inflammatory Steroid Action: Basic and Clinical Aspects. 280-302 (1989); Wahlet al., J. Immunol. 115: 476-481 (1975); Werb et al., J. Exp. Med. 147:1684-1694 (1978)). Glucocorticoids retard wound healing by inhibiting angiogenesis, decreasing vascular permeability (Ebert et al., An. Intern. Med. 37:701-705 (1952)), fibroblast proliferation, and collagen synthesis (Beck et al., Growth Factors. 5: 295-304 (1991); Haynes et al., J. Clin. Invest. 61: 703-797 (1978)) and producing a transient reduction of circulating monocytes (Haynes et al., J. Clin. Invest. 61: 703-797 (1978); Wahl, “Glucocorticoids and wound healing”, In: Antiinflammatory Steroid Action: Basic and Clinical Aspects, Academic Press, New York, pp. 280-302 (1989)). The systemic administration of steroids to impaired wound healing is a well establish phenomenon in rats (Beck et al., Growth Factors. 5: 295-304 (1991); Haynes et al., J. Clin. Invest. 61: 703-797 (1978); Wahl, “Glucocorticoids and wound healing”, In: Antiinflammatory Steroid Action: Basic and Clinical Aspects, Academic Press, New York, pp. 280-302 (1989); Pierce et al., Proc. Natl. Acad. Sci. USA 86: 2229-2223 (1989)).

[1125] To demonstrate that an albumin fusion protein of the invention can accelerate the healing process, the effects of multiple topical applications of the fusion protein on full thickness excisional skin wounds in rats in which healing has been impaired by the systemic administration of methylprednisolone is assessed.

[1126] Young adult male Sprague Dawley rats weighing 250-300 g (Charles River Laboratories) are used in this example. The animals are purchased at 8 weeks of age and are 9 weeks old at the beginning of the study. The healing response of rats is impaired by the systemic administration of methylprednisolone (17 mg/kg/rat intramuscularly) at the time of wounding. Animals are individually housed and received food and water ad libitum. All manipulations are performed using aseptic techniques. This study is conducted according to the rules and guidelines of Human Genome Sciences, Inc. Institutional Animal Care and Use Committee and the Guidelines for the Care and Use of Laboratory Animals.

[1127] The wounding protocol is followed according to that described above. On the day of wounding, animals are anesthetized with an intramuscular injection of ketarnine (50 mg/kg) and xylazine (5 mg/kg). The dorsal region of the animal is shaved and the skin washed with 70% ethanol and iodine solutions. The surgical area is dried with sterile gauze prior to wounding. An 8 mm full-thickness wound is created using a Keyes tissue punch. The wounds are left open for the duration of the experiment. Applications of the testing materials are given topically once a day for 7 consecutive days commencing on the day of wounding and subsequent to methylprednisolone administration. Prior to treatment, wounds are gently cleansed with sterile saline and gauze sponges.

[1128] Wounds are visually examined and photographed at a fixed distance at the day of wounding and at the end of treatment. Wound closure is determined by daily measurement on days 1-5 and on day 8. Wounds are measured horizontally and vertically using a calibrated Jameson caliper. Wounds are considered healed if granulation tissue is no longer visible and the wound is covered by a continuous epithelium.

[1129] The fusion protein of the invention is administered using at a range different doses, from 4 mg to 500 mg per wound per day for 8 days in vehicle. Vehicle control groups received 50 mL of vehicle solution.

[1130] Animals are euthanized on day 8 with an intraperitoneal injection of sodium pentobarbital (300 mg/kg). The wounds are surrounding skin are then harvested for histology. Tissue specimens are placed in 10% neutral buffered formalin in tissue cassettes between biopsy sponges for further processing.

[1131] Three groups of 10 animals each (5 with methylprednisolone and 5 without glucocorticoid) are evaluated: 1) Untreated group 2) Vehicle placebo control 3) treated groups.

[1132] Wound closure is analyzed by measuring the area in the vertical and horizontal axis and obtaining the total area of the wound. Closure is then estimated by establishing the differences between the initial wound area (day 0) and that of post treatment (day 8). The wound area on day 1 is 64 mm², the corresponding size of the dermal punch. Calculations are made using the following formula:
[Open area on day 8]−[Open area on day 1]/[Open area on day 1]

[1133] Specimens are fixed in 10% buffered formalin and paraffin embedded blocks are sectioned perpendicular to the wound surface (5 mm) and cut using an Olympus microtome. Routine hematoxylin-eosin (H&E) staining is performed on cross-sections of bisected wounds. Histologic examination of the wounds allows assessment of whether the healing process and the morphologic appearance of the repaired skin is improved by treatment with an albumin fusion protein of the invention. A calibrated lens micrometer is used by a blinded observer to determine the distance of the wound gap.

[1134] Experimental data are analyzed using an unpaired t test. A p value of <0.05 is considered significant.

[1135] The studies described in this example tested activity of an albumin fusion protein of the invention. However, one skilled in the art could easily modify the exemplified studies to test the activity of fusion proteins and polynucleotides of the invention (e.g., gene therapy).

### Example 27

### Lymphedema Animal Model

[1136] The purpose of this experimental approach is to create an appropriate and consistent lymphedema model for testing the therapeutic effects of an albumin fusion protein of the invention in lymphangiogenesis and re-establishment of the lymphatic circulatory system in the rat hind limb. Effectiveness is measured by swelling volume of the affected limb, quantification of the amount of lymphatic vasculature, total blood plasma protein, and histopathology. Acute lymphedema is observed for 7-10 days. Perhaps more importantly, the chronic progress of the edema is followed for up to 3-4 weeks.

[1137] Prior to beginning surgery, blood sample is drawn for protein concentration analysis. Male rats weighing approximately ˜350 g are dosed with Pentobarbital. Subsequently, the right legs are shaved from knee to hip. The shaved area is swabbed with gauze soaked in 70% EtOH. Blood is drawn for serum total protein testing. Circumference and volumetric measurements are made prior to injecting dye into paws after marking 2 measurement levels (0.5 cm above heel, at mid-pt of dorsal paw). The intradermal dorsum of both right and left paws are injected with 0.05 ml of 1% Evan's Blue. Circumference and volumetric measurements are then made following injection of dye into paws.

[1138] Using the knee joint as a landmark, a mid-leg inguinal incision is made circumferentially allowing the femoral vessels to be located. Forceps and hemostats are used to dissect and separate the skin flaps. After locating the femoral vessels, the lymphatic vessel that runs along side and underneath the vessel(s) is located. The main lymphatic vessels in this area are then electrically coagulated or suture ligated.

[1139] Using a microscope, muscles in back of the leg (near the semitendinosis and adductors) are bluntly dissected. The popliteal lymph node is then located. The 2 proximal and 2 distal lymphatic vessels and distal blood supply of the popliteal node are then ligated by suturing. The popliteal lymph node, and any accompanying adipose tissue, is then removed by cutting connective tissues.

[1140] Care is taken to control any mild bleeding resulting from this procedure. After lymphatics are occluded, the skin flaps are sealed by using liquid skin (Vetbond) (A J Buck). The separated skin edges are sealed to the underlying muscle tissue while leaving a gap of ˜0.5 cm around the leg. Skin also may be anchored by suturing to underlying muscle when necessary.

[1141] To avoid infection, animals are housed individually with mesh (no bedding). Recovering animals are checked daily through the optimal edematous peak, which typically occurred by day 5-7. The plateau edematous peak are then observed. To evaluate the intensity of the lymphedema, the circumference and volumes of 2 designated places on each paw before operation and daily for 7 days are measured. The effect of plasma proteins on lymphedema is determined and whether protein analysis is a useful testing perimeter is also investigated. The weights of both control and edematous limbs are evaluated at 2 places. Analysis is performed in a blind manner.

[1142] Circumference Measurements: Under brief gas anesthetic to prevent limb movement, a cloth tape is used to measure limb circumference. Measurements are done at the ankle bone and dorsal paw by 2 different people and those 2 readings are averaged. Readings are taken from both control and edematous limbs.

[1143] Volumetric Measurements: On the day of surgery, animals are anesthetized with Pentobarbital and are tested prior to surgery. For daily volumetrics animals are under brief halothane anesthetic (rapid immobilization and quick recovery), and both legs are shaved and equally marked using waterproof marker on legs. Legs are first dipped in water, then dipped into instrument to each marked level then measured by Buxco edema software (Chen/Victor). Data is recorded by one person, while the other is dipping the limb to marked area.

[1144] Blood-plasma protein measurements: Blood is drawn, spun, and serum separated prior to surgery and then at conclusion for total protein and Ca2⁺ comparison.

[1145] Limb Weight Comparison: After drawing blood, the animal is prepared for tissue collection. The limbs are amputated using a quillitine, then both experimental and control legs are cut at the ligature and weighed. A second weighing is done as the tibio-cacaneal joint is disarticulated and the foot is weighed.

[1146] Histological Preparations: The transverse muscle located behind the knee (popliteal) area is dissected and arranged in a metal mold, filled with freezeGel, dipped into cold methylbutane, placed into labeled sample bags at −80 EC until sectioning. Upon sectioning, the muscle is observed under fluorescent microscopy for lymphatics.

[1147] The studies described in this example tested activity of fusion proteins of the invention. However, one skilled in the art could easily modify the exemplified studies to test the activity of fusion protein and polynucleotides of the invention (e.g., gene therapy).

### Example 28

### Suppression of TNF Alpha-Induced Adhesion Molecule Expression by an Albumin Fusion Protein of the Invention

[1148] The recruitment of lymphocytes to areas of inflammation and angiogenesis involves specific receptor-ligand interactions between cell surface adhesion molecules (CAMs) on lymphocytes and the vascular endothelium. The adhesion process, in both normal and pathological settings, follows a multi-step cascade that involves intercellular adhesion molecule-1 (ICAM-1), vascular cell adhesion molecule-1 (VCAM-1), and endothelial leukocyte adhesion molecule-1 (E-selectin) expression on endothelial cells (EC). The expression of these molecules and others on the vascular endothelium determines the efficiency with which leukocytes may adhere to the local vasculature and extravasate into the local tissue during the development of an inflammatory response. The local concentration of cytokines and growth factor participate in the modulation of the expression of these CAMs.

[1149] Tumor necrosis factor alpha (TNF-a), a potent proinflammatory cytokine, is a stimulator of all three CAMs on endothelial cells and may be involved in a wide variety of inflammatory responses, often resulting in a pathological outcome.

[1150] The potential of an albumin fusion protein of the invention to mediate a suppression of TNF-a induced CAM expression can be examined. A modified ELISA assay which uses ECs as a solid phase absorbent is employed to measure the amount of CAM expression on TNF-a treated ECs when co-stimulated with a member of the FGF family of proteins.

[1151] To perform the experiment, human umbilical vein endothelial cell (HUVEC) cultures are obtained from pooled cord harvests and maintained in growth medium (EGM-2; Clonetics, San Diego, Calif.) supplemented with 10% FCS and 1% penicillin/streptomycin in a 37 degree C. humidified incubator containing 5% CO₂. HUVECs are seeded in 96-well plates at concentrations of 1×10⁴ cells/well in EGM medium at 37 degree C. for 18-24 hrs or until confluent. The monolayers are subsequently washed 3 times with a serum-free solution of RPMI-1640 supplemented with 100 U/ml penicillin and 100 mg/ml streptomycin, and treated with a given cytokine and/or growth factor(s) for 24 h at 37 degree C. Following incubation, the cells are then evaluated for CAM expression.

[1152] Human Umbilical Vein Endothelial cells (HUVECs) are grown in a standard 96 well plate to confluence. Growth medium is removed from the cells and replaced with 90 ul of 199 Medium (10% FBS). Samples for testing and positive or negative controls are added to the plate in triplicate (in 10 ul volumes). Plates are incubated at 37 degree C. for either 5 h (selectin and integrin expression) or 24 h (integrin expression only). Plates are aspirated to remove medium and 100 μl of 0.1% paraformaldehyde-PBS (with Ca++ and Mg++) is added to each well. Plates are held at 4° C. for 30 min.

[1153] Fixative is then removed from the wells and wells are washed 1× with PBS(+Ca,Mg)+0.5% BSA and drained. Do not allow the wells to dry. Add 10 μl of diluted primary antibody to the test and control wells. Anti-ICAM-1-Biotin, Anti-VCAM-1-Biotin and Anti-E-selectin-Biotin are used at a concentration of 10 μg/ml (1:10 dilution of 0.1 mg/ml stock antibody). Cells are incubated at 37° C. for 30 min. in a humidified environment. Wells are washed ×3 with PBS(+Ca,Mg)+0.5% BSA.

[1154] Then add 20 μl of diluted ExtrAvidin-Alaline Phosphotase (1:5,000 dilution) to each well and incubated at 37° C. for 30 min. Wells are washed ×3 with PBS(+Ca,Mg)+0.5% BSA. 1 tablet of p-Nitrophenol Phosphate pNPP is dissolved in 5 ml of glycine buffer (pH 10.4). 100 μl of pNPP substrate in glycine buffer is added to each test well. Standard wells in triplicate are prepared from the working dilution of the ExtrAvidin-Alkaline Phosphotase in glycine buffer: 1:5,000 (10⁰)>10^{-0.5}>10⁻¹>10^{-1.5}.5 μl of each dilution is added to triplicate wells and the resulting AP content in each well is 5.50 ng, 1.74 ng, 0.55 ng, 0.18 ng. 100 μl of pNNP reagent must then be added to each of the standard wells. The plate must be incubated at 37° C. for 4 h. A volume of 50 μl of 3M NaOH is added to all wells. The results are quantified on a plate reader at 405 nm. The background subtraction option is used on blank wells filled with glycine buffer only. The template is set up to indicate the concentration of AP-conjugate in each standard well [5.50 ng; 1.74 ng; 0.55 ng; 0.18 ng]. Results are indicated as amount of bound AP-conjugate in each sample.

[1155] The studies described in this example tested activity of fusion proteins of the invention. However, one skilled in the art could easily modify the exemplified studies to test the activity of fusion proteins and polynucleotides of the invention (e.g., gene therapy).

### Example 29

### Construction of GAS Reporter Construct

[1156] One signal transduction pathway involved in the differentiation and proliferation of cells is called the Jaks-STATs pathway. Activated proteins in the Jaks-STATs pathway bind to gamma activation site “GAS” elements or interferon-sensitive responsive element (“ISRE”), located in the promoter of many genes. The binding of a protein to these elements alter the expression of the associated gene.

[1157] GAS and ISRE elements are recognized by a class of transcription factors called Signal Transducers and Activators of Transcription, or “STATs.” There are six members of the STATs family. Stat1 and Stat3 are present in many cell types, as is Stat2 (as response to IFN-alpha is widespread). Stat4 is more restricted and is not in many cell types though it has been found in T helper class I, cells after treatment with IL-12. Stat5 was originally called mammary growth factor, but has been found at higher concentrations in other cells including myeloid cells. It can be activated in tissue culture cells by many cytokines.

[1158] The STATs are activated to translocate from the cytoplasm to the nucleus upon tyrosine phosphorylation by a set of kinases known as the Janus Kinase (“Jaks”) family. Jaks represent a distinct family of soluble tyrosine kinases and include Tyk2, Jak1, Jak2, and Jak3. These kinases display significant sequence similarity and are generally catalytically inactive in resting cells.

[1159] The Jaks are activated by a wide range of receptors summarized in the Table below. (Adapted from review by Schidler and Damell, Ann. Rev. Biochem. 64:621-51 (1995)). A cytokine receptor family, capable of activating Jaks, is divided into two groups: (a) Class 1 includes receptors for IL-2, IL-3, IL-4, IL-6, IL-7, IL-9, IL-11, IL-12, IL-15, Epo, PRL, GH, G-CSF, GM-CSF, LIF, CNTF, and thrombopoietin; and (b) Class 2 includes IFN-a, IFN-g, and IL-10. The Class 1 receptors share a conserved cysteine motif (a set of four conserved cysteines and one tryptophan) and a WSXWS motif (a membrane proximal region encoding Trp-Ser-Xaa-Trp-Ser (SEQ ID NO: 37)).

[1160] Thus, on binding of a ligand to a receptor, Jaks are activated, which in turn activate STATs, which then translocate and bind to GAS elements. This entire process is encompassed in the Jaks-STATs signal transduction pathway. Therefore, activation of the Jaks-STATs pathway, reflected by the binding of the GAS or the ISRE element, can be used to indicate proteins involved in the proliferation and differentiation of cells. For example, growth factors and cytokines are known to activate the Jaks-STATs pathway (See Table below). Thus, by using GAS elements linked to reporter molecules, activators of the Jaks-STATs pathway can be identified.

| | JAKs | | | | | |
|---|---|---|---|---|---|---|
| Ligand | tyk2 | Jak1 | Jak2 | Jak3 | STATS | GAS(elements) or ISRE |
| IFN family | | | | | | |
| IFN-a/B | + | + | − | − | 1, 2, 3 | ISRE |
| IFN-g | | + | + | − | 1 | GAS (IRF1 > Lys6 > IFP) |
| Il-10 | + | ? | ? | − | 1, 3 | |
| gp130 family | | | | | | |
| IL-6 (Pleiotropic) | + | + | + | ? | 1, 3 | GAS (IRF1 > Lys6 > IFP) |
| Il-11 (Pleiotropic) | ? | + | ? | ? | 1, 3 | |
| OnM (Pleiotropic) | ? | + | + | ? | 1, 3 | |
| LIF (Pleiotropic) | ? | + | + | ? | 1, 3 | |
| CNTF (Pleiotropic) | −/+ | + | + | ? | 1, 3 | |
| G-CSF (Pleiotropic) | ? | + | ? | ? | 1, 3 | |
| IL-12 (Pleiotropic) | + | − | + | + | 1, 3 | |
| g-C family | | | | | | |
| IL-2 (lymphocytes) | − | + | − | + | 1, 3, 5 | GAS |
| IL-4 (lymph/myeloid) | − | + | − | + | 6 | GAS (IRF1 = IFP >> Ly6)(IgH) |
| IL-7 (lymphocytes) | − | + | − | + | 5 | GAS |
| IL-9 (lymphocytes) | − | + | − | + | 5 | GAS |
| IL-13 (lymphocyte) | − | + | ? | ? | 6 | GAS |
| IL-15 | ? | + | ? | + | 5 | GAS |
| gp140 family | | | | | | |
| IL-3 (myeloid) | − | − | + | − | 5 | GAS (IRF1 > IFP >> Ly6) |
| IL-5 (myeloid) | − | − | + | − | 5 | GAS |
| GM-CSF (myeloid) | − | − | + | − | 5 | GAS |
| Growth hormone family | | | | | | |
| GH | ? | − | + | − | 5 | |
| PRL | ? | +/− | + | − | 1, 3, 5 | |
| EPO | ? | − | + | − | 5 | GAS(B-CAS > IRF1 = IFP >> Ly6) |
| Receptor Tyrosine Kinases | | | | | | |
| EGF | ? | + | + | − | 1, 3 | GAS (IRF1) |
| PDGF | ? | + | + | − | 1, 3 | |
| CSF-1 | ? | + | + | − | 1, 3 | GAS (not IRF1) |

[1161] To construct a synthetic GAS containing promoter element, which is used in the Biological Assays described in Examples 32-33, a PCR based strategy is employed to generate a GAS-SV40 promoter sequence. The 5′ primer contains four tandem copies of the GAS binding site found in the IRF1 promoter and previously demonstrated to bind STATs upon induction with a range of cytokines (Rothman et al., Immunity 1:457-468 (1994).), although other GAS or ISRE elements can be used instead. The 5′ primer also contains 18 bp of sequence complementary to the SV40 early promoter sequence and is flanked with an XhoI site. The sequence of the 5′ primer is:

| | |
|---|---|
| 5′:GCGCCTCGAGATTTCCCCGAAATCTAGATTTCCCCGAAATGATTTCCCCGAAATGATTTCCCCGAAATATCTGCCATCTCAAT | (SEQ ID NO: 38) |
| TAG:3′ | |

[1162] The downstream primer is complementary to the SV40 promoter and is flanked with a Hind III site:

| | |
|---|---|
| 5′:GCGGCAAGCTTTTTGCAAAGCCTAGGC:3′ | (SEQ ID NO: 39) |

[1163] PCR amplification is performed using the SV40 promoter template present in the B-gal:promoter plasmid obtained from Clontech. The resulting PCR fragment is digested with XhoI/Hind III and subcloned into BLSK2−. (Stratagene.) Sequencing with forward and reverse primers confirms that the insert contains the following sequence:

(SEQ ID NO: 40)

5′:CTCGAGATTTCCCCGAAATCTAGATTTCCCCGAAATGATTTCCCCGA
AATGATTTCCCCGAAATATCTGCCATCTCAATTAGTCAGCAACCATAGTC
CCGCCCCTAACTCCGCCCATCCCGCCCCTAACTCCGCCCAGTTCCGCCCA
TTCTCCGCCCCATGGCTGACTAATTTTTTTTATTTATGCAGAGGCCGAGG
CCGCCTCGGCCTCTGAGCTATTCCAGAAGTAGTGAGGAGGCTTTTTTGGA
GGCCTAGGCTTTTGCAAAAAGCTT:3′

[1164] With this GAS promoter element linked to the SV40 promoter, a GAS:SEAP2 reporter construct is next engineered. Here, the reporter molecule is a secreted alkaline phosphatase, or “SEAP.” Clearly, however, any reporter molecule can be instead of SEAP, in this or in any of the other Examples. Well known reporter molecules that can be used instead of SEAP include chloramphenicol acetyltransferase (CAT), luciferase, alkaline phosphatase, B-galactosidase, green fluorescent protein (GFP), or any protein detectable by an antibody.

[1165] The above sequence confirmed synthetic GAS-SV40 promoter element is subcloned into the pSEAP-Promoter vector obtained from Clontech using HindIII and XhoI, effectively replacing the SV40 promoter with the amplified GAS:SV40 promoter element, to create the GAS-SEAP vector. However, this vector does not contain a neomycin resistance gene, and therefore, is not preferred for mammalian expression systems.

[1166] Thus, in order to generate mammalian stable cell lines expressing the GAS-SEAP reporter, the GAS-SEAP cassette is removed from the GAS-SEAP vector using SalI and NotI, and inserted into a backbone vector containing the neomycin resistance gene, such as pGFP-1 (Clontech), using these restriction sites in the multiple cloning site, to create the GAS-SEAP/Neo vector. Once this vector is transfected into mammalian cells, this vector can then be used as a reporter molecule for GAS binding as described in Examples 32-33.

[1167] Other constructs can be made using the above description and replacing GAS with a different promoter sequence. For example, construction of reporter molecules containing EGR and NF-KB promoter sequences are described in Examples 34 and 35. However, many other promoters can be substituted using the protocols described in these Examples. For instance, SRE, IL-2, NFAT, or Osteocalcin promoters can be substituted, alone or in combination (e.g., GAS/NF-KB/EGR, GAS/NF-KB, IL-2/NFAT, or NF-KB/GAS). Similarly, other cell lines can be used to test reporter construct activity, such as HELA (epithelial), HUVEC (endothellal), Reh (B-cell), Saos-2 (osteoblast), HUVAC (aortic), or Cardiomyocyte.

### Example 30

### Assay for SEAP Activity

[1168] As a reporter molecule for the assays described in examples disclosed herein, SEAP activity is assayed using the Tropix Phospho-light Kit (Cat. BP-400) according to the following general procedure. The Tropix Phospho-light Kit supplies the Dilution, Assay, and Reaction Buffers used below.

[1169] Prime a dispenser with the 2.5× Dilution Buffer and dispense 15 ul of 2.5× dilution buffer into Optiplates containing 35 ul of a solution containing an albumin fusion protein of the invention. Seal the plates with a plastic sealer and incubate at 65 degree C. for 30 min. Separate the Optiplates to avoid uneven heating.

[1170] Cool the samples to room temperature for 15 minutes. Empty the dispenser and prime with the Assay Buffer. Add 50 ml Assay Buffer and incubate at room temperature 5 min. Empty the dispenser and prime with the Reaction Buffer (see the Table below). Add 50 ul Reaction Buffer and incubate at room temperature for 20 minutes. Since the intensity of the chemiluminescent signal is time dependent, and it takes about 10 minutes to read 5 plates on a luminometer, thus one should treat 5 plates at each time and start the second set 10 minutes later.

[1171] Read the relative light unit in the luminometer. Set H12 as blank, and print the results. An increase in chemiluminescence indicates reporter activity.

Reaction Buffer Formulation:

| # of plates | Rxn buffer diluent (ml) | CSPD (ml) |
|---|---|---|
| 10 | 60 | 3 |
| 11 | 65 | 3.25 |
| 12 | 70 | 3.5 |
| 13 | 75 | 3.75 |
| 14 | 80 | 4 |
| 15 | 85 | 4.25 |
| 16 | 90 | 4.5 |
| 17 | 95 | 4.75 |
| 18 | 100 | 5 |
| 19 | 105 | 5.25 |
| 20 | 110 | 5.5 |
| 21 | 115 | 5.75 |
| 22 | 120 | 6 |
| 23 | 125 | 6.25 |
| 24 | 130 | 6.5 |
| 25 | 135 | 6.75 |
| 26 | 140 | 7 |
| 27 | 145 | 7.25 |
| 28 | 150 | 7.5 |
| 29 | 155 | 7.75 |
| 30 | 160 | 8 |
| 31 | 165 | 8.25 |
| 32 | 170 | 8.5 |
| 33 | 175 | 8.75 |
| 34 | 180 | 9 |
| 35 | 185 | 9.25 |
| 36 | 190 | 9.5 |
| 37 | 195 | 9.75 |
| 38 | 200 | 10 |
| 39 | 205 | 10.25 |
| 40 | 210 | 10.5 |
| 41 | 215 | 10.75 |
| 42 | 220 | 11 |
| 43 | 225 | 11.25 |
| 44 | 230 | 11.5 |
| 45 | 235 | 11.75 |
| 46 | 240 | 12 |
| 47 | 245 | 12.25 |
| 48 | 250 | 12.5 |
| 49 | 255 | 12.75 |
| 50 | 260 | 13 |

### Example 31

### Assay Identifying Neuronal Actvity.

[1172] When cells undergo differentiation and proliferation, a group of genes are activated through many different signal transduction pathways. One of these genes, EGR1 (early growth response gene 1), is induced in various tissues and cell types upon activation. The promoter of EGR1 is responsible for such induction. Using the EGR1 promoter linked to reporter molecules, the ability of fusion proteins of the invention to activate cells can be assessed.

[1173] Particularly, the following protocol is used to assess neuronal activity in PC12 cell lines. PC12 cells (rat phenochromocytoma cells) are known to proliferate and/or differentiate. by activation with a number of mitogens, such as TPA (tetradecanoyl phorbol acetate), NGF (nerve growth factor), and EGF (epidermal growth factor). The EGR1 gene expression is activated during this treatment. Thus, by stably transfecting PC12 cells with a construct containing an EGR promoter linked to SEAP reporter, activation of PC12 cells by an albumin fusion protein of the present invention can be assessed.

[1174] The EGR/SEAP reporter construct can be assembled by the following protocol. The EGR-1 promoter sequence (−633 to +1)(Sakamoto K et al., Oncogene 6:867-871 (1991)) can be PCR amplified from human genomic DNA using the following primers:

(SEQ ID NO: 41)

5′ GCGCTCGAGGGATGACAGCGATAGAACCCCGG-3′

(SEQ ID NO: 42)

5′ GCGAAGCTTCGCGACTCCCCGGATCCGCCTC-3′

[1175] Using the GAS:SEAP/Neo vector produced in Example 29, EGR1 amplified product can then be inserted into this vector. Linearize the GAS:SEAP/Neo vector using restriction enzymes XhoI/HindIII, removing the GAS/SV40 stuffer. Restrict the EGR1 amplified product with these same enzymes. Ligate the vector and the EGR1 promoter.

[1176] To prepare 96 well-plates for cell culture, two mls of a coating solution (1:30 dilution of collagen type I (Upstate Biotech Inc. Cat#08-115) in 30% ethanol (filter sterilized)) is added per one 10 cm plate or 50 ml per well of the 96-well plate, and allowed to dry for 2 hr.

[1177] PC12 cells are routinely grown in RPMI-1640 medium (Bio Whittaker) containing 10% horse serum (JRH BIOSCIENCES, Cat. #12449-78P), 5% heat-inactivated fetal bovine serum (FBS) supplemented with 100 units/ml penicillin and 100 ug/ml streptomycin on a precoated 10 cm tissue culture dish. One to four split is done every three to four days. Cells are removed from the plates by scraping and resuspended with pipetting up and down for more than 15 times.

[1178] Transfect the EGR/SEAP/Neo construct into PC12 using techniques known in the art. EGR-SEAP/PC12 stable cells are obtained by growing the cells in 300 ug/ml G418. The G418-free medium is used for routine growth but every one to two months, the cells should be re-grown in 300 ug/ml G418 for couple of passages.

[1179] To assay for neuronal activity, a 10 cm plate with cells around 70 to 80% confluent is screened by removing the old medium. Wash the cells once with PBS (Phosphate buffered saline). Then starve the cells in low serum medium (RPMI-1640 containing 1% horse serum and 0.5% FBS with antibiotics) overnight.

[1180] The next morning, remove the medium and wash the cells with PBS. Scrape off the cells from the plate, suspend the cells wells in 2 ml low serum medium. Count the cell number and add more low serum medium to reach final cell density as 5×10⁵ cells/ml.

[1181] Add 200 ul of the cell suspension to each well of 96-well plate (equivalent to 1×10⁵ cells/well). Add a series of different concentrations of an albumin fusion protein of the inventon, 37 degree C. for 48 to 72 hr. As a positive control, a growth factor known to activate PC12 cells through EGR can be used, such as 50 ng/ul of Neuronal Growth Factor (NGF). Over fifty-fold induction of SEAP is typically seen in the positive control wells. SEAP assay may be routinely performed using techniques known in the art and/or as described in Example 30.

### Example 32

### Assay for T-Cell Actvity

[1182] The following protocol is used to assess T-cell activity by identifying factors, and determining whether an albumin fusion protein of the invention proliferates and/or differentiates T-cells. T-cell activity is assessed using the GAS/SEAP/Neo construct produced in Example 29. Thus, factors that increase SEAP activity indicate the ability to activate the Jaks-STATS signal transduction pathway. The T-cell used in this assay is Jurkat T-cells (ATCC Accession No. TIB-152), although Molt-3 cells (ATCC Accession No. CRL-1552) and Molt-4 cells (ATCC Accession No. CRL-1582) cells can also be used.

[1183] Jurkat T-cells are lymphoblastic CD4+Th1 helper cells. In order to generate stable cell lines, approximately 2 million Jurkat cells are transfected with the GAS-SEAP/neo vector using DMRIE-C (Life Te chnologies)(transfection procedure described below). The transfected cells are seeded to a density of approximately 20,000 cells per well and transfectants resistant to 1 mg/ml genticin selected. Resistant colonies are expanded and then tested for their response to increasing concentrations of interferon gamma. The dose response of a selected clone is demonstrated.

[1184] Specifically, the following protocol will yield sufficient cells for 75 wells containing 200 ul of cells. Thus, it is either scaled up, or performed in multiple to generate sufficient cells for multiple 96 well plates. Jurkat cells are maintained in RPMI+10% serum with 1% Pen-Strep. Combine 2.5 mls of OPTI-MEM (Life Technologies) with 10 ug of plasmid DNA in a T25 flask. Add 2.5 ml OPTI-MEM containing 50 ul of DMRIE-C and incubate at room temperature for 15-45 mins.

[1185] During the incubation period, count cell concentration, spin down the required number of cells (10⁷ per transfection), and resuspend in OPTI-MEM to a final concentration of 10⁷ cells/ml. Then add 1 ml of 1×10⁷ cells in OPTI-MEM to T25 flask and incubate at 37 degree C. for 6 hrs. After the incubation, add 10 ml of RPMI+15% serum.

[1186] The Jurkat:GAS-SEAP stable reporter lines are maintained in RPMI+10% serum, 1 mg/ml Genticin, and 1% Pen-Strep. These cells are treated with varying concentrations of one or more fusion proteins of the present invention.

[1187] On the day of treatment with the fusion protein, the cells should be washed and resuspended in fresh RPMI+10% serum to a density of 500,000 cells per ml. The exact number of cells required will depend on the number of fusion proteins and the number of different concentrations of fusion proteins being screened. For one 96 well plate, approximately 10 million cells (for 10 plates, 10 million cells) are required.

[1188] The well dishes containing Jurkat cells treated with the fusion protein are placed in an incubator for 48 hrs (note: this time is variable between 48-72 hrs). 35 ul samples from each well are then transferred to an, opaque 96 well plate using a 12 channel pipette. The opaque plates should be covered (using sellophene covers) and stored at −20 degree C. until SEAP assays are performed according to Example 30. The plates containing the remaining treated cells are placed at 4 degree C. and serve as a source of material for repeating the assay on a specific well if desired.

[1189] As a positive control, 100 Unit/ml interferon gamma can be used which is known to activate Jurkat T cells. Over 30 fold induction is typically observed in the positive control wells.

[1190] The above protocol may be used in the generation of both transient, as well as, stable transfected cells, which would be apparent to those of skill in the art.

### Example 33

### Assay for T-Cell Activity

[1191] NF-KB (Nuclear Factor KB) is a transcription factor activated by a wide variety of agents including the inflammatory cytokines IL-1 and TNF, CD30 and CD40, lymphotoxin-alpha and lymphotoxin-beta, by exposure to LPS or thrombin, and by expression of certain viral gene products. As a transcription factor, NF-KB regulates the expression of genes involved in immune cell activation, control of apoptosis (NF-KB appears to shield cells from apoptosis), B and T-cell development, anti-viral and antimicrobial responses, and multiple stress responses.

[1192] In non-stimulated conditions, NF-KB is retained in the cytoplasm with I-KB (inhibitor KB). However, upon stimulation I-KB is phosphorylated and degraded, causing NF-KB to shuttle to the nucleus, thereby activating transcription of target genes. Target genes activated by NF-KB include IL-2, IL-6, GM-CSF, ICAM-1 and class 1 MHC.

[1193] Due to its central role and ability to respond to a range of stimuli, reporter constructs utilizing the NF-KB promoter element are used to screen the fusion protein. Activators or inhibitors of NF-KB would be useful in treating, preventing, and/or diagnosing diseases. For example, inhibitors of NF-KB could be used to treat those diseases related to the acute or chronic activation of NF-KB, such as rheumatoid arthritis.

[1194] To construct a vector containing the NF-KB promoter element, a PCR based strategy is employed. The upstream primer contains four tandem copies of the NF-KB binding site (GGGGACTTTCCC) (SEQ ID NO: 43), 18 bp of sequence complementary to the 5′ end of the SV40 early promoter sequence, and is flanked with an XhoI site:

(SEQ ID NO: 44)

5′:GCGGCCTCGAGGGGACTTTCCCGGGGACTTTCCGGGGACTTTCCGGG
ACTTTCCATCCTGCCATCTCAATTAG:3′

[1195] The downstream primer is complementary to the 3′ end of the SV40 promoter and is flanked with a Hind III site: 5′:GCGGCAAGCTTTTTGCAAAGCCTAGGC:3′ (SEQ ID NO: 39)

[1196] PCR amplification is performed using the SV40 promoter template present in the pB-gal:promoter plasmid obtained from Clontech. The resulting PCR fragment is digested with XhoI and Hind III and subcloned into BLSK2−. (Stratagene) Sequencing with the T7 and T3 primers confums the insert contains the following sequence:

(SEQ ID NO: 45)

5′:CTCGAGGGGACTTTCCCGGGGACTTTCCGGGGACTTTCCGGGACTTT
CCATCTGCCATCTCAATTAGTCAGCAACCATAGTCCCGCCCCTAACTCCG
CCCATCCCGCCCCTAACTCCGCCCAGTTCCGCCCATTCTCCGCCCCATGG
CTGACTAATTTTTTTTATTTATGCAGAGGCCGAGGCCGCCTCGGCCTCTG
AGCTATTCCAGAAGTAGTGAGGAGGCTTTTTTGGAGGCCTAGGCTTTTGC
AAAAAGCTT:3′

[1197] Next, replace the SV40 minimal promoter element present in the pSEAP2-promoter plasmid (Clontech) with this NF-KB/SV40 fragment using XhoI and HindIII. However, this vector does not contain a neomycin resistance gene, and therefore, is not preferred for mammalian expression systems.

[1198] In order to generate stable mammalian cell lines, the NF-KB/SV40/SEAP cassette is removed from the above NF-KB/SEAP vector using restriction enzymes SalI and NotI, and inserted into a vector containing neomycin resistance. Particularly, the NF-KB/SV40/SEAP cassette was inserted into pGFP-1 (Clontech), replacing the GFP gene, after restricting pGFP-1 with SalI and NotI.

[1199] Once NF-KB/SV40/SEAP/Neo vector is created, stable Jurkat T-cells are created and maintained according to the protocol described in Example 32. Similarly, the method for assaying fusion proteins with these stable Jurkat T-cells is also described in Example 32. As a positive control, exogenous TNF alpha (0.1, 1, 10 ng) is added to wells H9, H10, and H11, with a 5-10 fold activation typically observed.

### Example 33

### Assay Identifying Myeloid Activity

[1200] The following protocol is used to assess myeloid activity of an albumin fusion protein of the present invention by determining whether the fusion protein proliferates and/or differentiates myeloid cells. Myeloid cell activity is assessed using the GAS/SEAP/Neo construct produced in Example 29. Thus, factors that increase SEAP activity indicate the ability to activate the Jaks-STATS signal transduction pathway. The myeloid cell used in this assay is U937, a pre-monocyte cell line, although TF-1, HL60, or KGI can be used.

[1201] To transiently transfect U937 cells with the GAS/SEAP/Neo construct produced in Example 29, a DEAE-Dextran method (Kharbanda et. al., 1994, Cell Growth & Differentiation, 5:259-265) is used. First, harvest 2×10⁷ U937 cells and wash with PBS. The U937 cells are usually grown in RPMI 1640 medium containing 10% heat-inactivated fetal bovine serum (FBS) supplemented with 100 units/ml penicillin and 100 mg/ml streptomycin.

[1202] Next, suspend the cells in 1 ml of 20 mM Tris-HCl (pH 7.4) buffer containing 0.5 mg/ml DEAE-Dextran, 8 ug GAS-SEAP2 plasmid DNA, 140 mM NaCl, 5 mM KCl, 375 uM Na₂HPO₄.7H₂O, 1 mM MgCl₂, and 675 uM CaCl₂. Incubate at 37 degrees C. for 45 min.

[1203] Wash the cells with RPMI 1640 medium containing 10% FBS and then resuspend in 10 ml complete medium and incubate at 37 degree C. for 36 hr.

[1204] The GAS-SEAP/U937 stable cells are obtained by growing the cells in 400 ug/ml G418. The,G418-free medium is used for routine growth but every one to two months, the cells should be re-grown in 400 ug/ml G418 for couple of passages.

[1205] These cells are tested by harvesting 1×10⁸ cells (this is enough for ten 96-well plates assay) and wash with PBS. Suspend the cells in 200 ml above described growth medium, with a final density of 5×10⁵ cells/ml. Plate 200 ul cells per well in the 96-well plate (or 1×10⁵ cells/well).

[1206] Add different concentrations of the fusion protein. Incubate at 37 degee C. for 48 to 72 hr. As a positive control, 100 Unit/ml interferon gamma can be used which is known to activate U937 cells. Over 30 fold induction is typically observed in the positive control wells. SEAP assay the supernatant according to methods known in the art and/or the protocol described in Example 30.

### Example 34

### Assay Identifying Changes in Small Molecule Concentration and Membrane Permeability

[1207] Binding of a ligand to a receptor is known to alter intracellular levels of small molecules, such as calcium, potassium, sodium, and pH, as well as alter membrane potential. These alterations can be measured in an assay to identify fusion proteins which bind to receptors of a particular cell. Although the following protocol describes an assay for calcium, this protocol can easily be modified to detect changes in potassium, sodium, pH, membrane potential, or any other small molecule which is detectable by a fluorescent probe.

[1208] The following assay uses Fluorometric Imaging Plate Reader (“FIPR”) to measure changes in fluorescent molecules (Molecular Probes) that bind small molecules. Clearly, any fluorescent molecule detecting a small molecule can be used instead of the calcium fluorescent molecule, fluo-4 (Molecular Probes, Inc.; catalog no. F- 14202), used here.

[1209] For adherent cells, seed the cells at 10,000-20,000 cells/well in a Co-star black 96-well plate with clear bottom. The plate is incubated in a CO₂ incubator for 20 hours. The adherent cells are washed two times in Biotek washer with 200 ul of HBSS (Hank's Balanced Salt Solution) leaving 100 ul of buffer after the final wash.

[1210] A stock solution of 1 mg/ml fluo-4 is made in 10% pluronic acid DMSO. To load the cells with fluo-4, 50 ul of 12 ug/ml flo-4 is added to each well. The plate is incubated at 37 degrees C. in a CO₂ incubator for 60 min. The plate is washed four times in the Biotek washer with HBSS leaving 100 ul of buffer.

[1211] For non-adherent cells, the cells are spun down from culture media. Cells are re-suspended to 2-5×10⁶ cells/ml with HBSS in a 50-ml conical tube. 4 ul of 1 mg/ml fluo-4 solution in 10% pluronic acid DMSO is added to each ml of cell suspension. The tube is then placed in a 37 degrees C. water bath for 30-60 min. The cells are washed twice with HBSS, resuspended to 1×10⁶ cells/ml, and dispensed into a microplate, 100 ul/well. The plate is centrifuged at 1000 rpm for 5 min. The plate is then washed once in Denley Cell Wash with 200 ul, followed by an aspiration step to 100 ul final volume.

[1212] For a non-cell based assay, each well contains a fluorescent molecule, such as fluo-4. The fusion protein of the invention is added to the well, and a change in fluorescence is detected.

[1213] To measure the fluorescence of intracellular calcium, the FLUPR is set for the following parameters: (1) System gain is 300-800 mW; (2) Exposure time is 0.4 second; (3) Camera F/stop is F/2; (4) Excitation is 488 nm; (5) Emission is 530 nm; and (6) Sample addition is 50 ul. Increased emission at 530 nm indicates an extracellular signaling event caused by an albumin fusion protein of the present invention or a molecule induced by an albumin fusion protein of the present invention, which has resulted-in an increase in the intracellular Ca⁺⁺ concentration.

### Example 35

### Assay Identifying Tyrosine Kinase Activity

[1214] The Protein Tyrosine Kinases (PTK) represent a diverse group of transmembrane and cytoplasmic kinases. Within the Receptor Protein Tyrosine Kinase (RPTK) group are receptors for a range of mitogenic and metabolic growth factors including the PDGF, FGF, EGF, NGF, HGF and Insulin receptor subfamilies. In addition there are a large family of RPTKs for which the corresponding ligand is unknown. Ligands for RPTKs include mainly secreted small proteins, but also membrane-bound and extracellular matrix proteins.

[1215] Activation of RPTK by ligands involves ligand-mediated receptor dimerization, resulting in transphosphorylation of the receptor subunits and activation of the cytoplasmic tyrosine kinases. The cytoplasmic tyrosine kinases include receptor associated tyrosine kinases of the src-family (e.g., src, yes, lck, lyn, fyn) and non-receptor linked and cytosolic protein tyrosine kinases, such as the Jak family, members of which mediate signal transduction triggered by the cytokine superfamily of receptors (e.g., the Interleukins, Interferons, GM-CSF, and Leptin).

[1216] Because of the wide range of known factors capable of stimulating tyrosine kinase activity, identifying whether an albumin fusion protein of the present invention or a molecule induced by a fusion proetin of the present invention is capable of activating tyrosine kinase signal transduction pathways is of interest. Therefore, the following protocol is designed to identify such molecules capable of activating the tyrosine kinase signal transduction pathways.

[1217] Seed target cells (e.g., primary keratinocytes) at a density of approximately 25,000 cells per well in a 96 well Loprodyne Silent Screen Plates purchased from Nalge Nunc (Naperville, Ill.). The plates are sterilized with two 30 minute rinses with 100% ethanol, rinsed with water and dried overmight. Some plates are coated for 2 hr with 100 ml of cell culture grade type I collagen (50 mg/ml), gelatin (2%) or polylysine (50 mg/ml), all of which can be purchased from Sigma Chemicals (St. Louis, Mo.) or 10% Matrigel purchased from Becton Dickinson (Bedford, Mass.), or calf serum, rinsed with PBS and stored at 4 degree C. Cell growth on these plates is assayed by seeding 5,000 cells/well in growth medium and indirect quantitation of cell number through use of alamarBlue as described by the manufacturer Alamar Biosciences, Inc. (Sacramento, Calif.) after 48 hr. Falcon plate covers #3071 from Becton Dickinson (Bedford, Mass.) are used to cover the Loprodyne Silent Screen Plates. Falcon Microtest III cell culture plates can also be used in some proliferation experiments.

[1218] To prepare extracts, A431 cells are seeded onto the nylon membranes of Loprodyne plates (20,000/200 ml/well) and overnight in complete medium. Cells are quiesced by incubation in serum-free basal medium for 24 hr. After 5-20 minutes treatment with EGF (60 ng/ml) or a different concentrations of an albumin fusion protein of the invention, the medium was removed and 100 ml of extraction buffer ((20 mM HEPES pH 7.5, 0.15 M NaCl, 1% Triton X-100, 0.1% SDS, 2 mM Na3VO4, 2 mM Na4P2O7 and a cocktail of protease inhibitors (#1836170) obtained from Boeheringer Mannheim (Indianapolis, Ind.)) is added to each well and the plate is shaken on a rotating shaker for 5 minutes at 4° C. The plate is then placed in a vacuum transfer manifold and the extract filtered through the 0.45 mm membrane bottoms of each well using house vacuum. Extracts are collected in a 96-well catch/assay plate in the bottom of the vacuum manifold and immediately placed on ice. To obtain extracts clarified by centrifugation, the content of each well, after detergent solubilization for 5 minutes, is removed and centrifuged for 15 minutes at 4 degree C. at 16,000×g.

[1219] Test the filtered extracts for levels of tyrosine kinase activity. Although many methods of detecting tyrosine kinase activity are known, one method is described here.

[1220] Generally, the tyrosine kinase activity of an albumin fusion protein of the invention is evaluated by determining its ability to phosphorylate a tyrosine residue on a specific substrate (a biotinylated peptide). Biotinylated peptides that can be used for this purpose include PSK1 (corresponding to amino acids 6-20 of the cell division kinase cdc2-p34) and PSK2 (corresponding to amino acids 1-17 of gastrin). Both peptides are substrates for a range of tyrosine kinases and are available from Boehringer Mannheim.

[1221] The tyrosine kinase reaction is set up by adding the following components in order. First, add 10 ul of 5 uM Biotinylated Peptide, then 10 ul ATP/Mg₂₊ (5 mM ATP/50 mM MgCl₂), then 10 ul of 5× Assay Buffer (40 mM imidazole hydrochloride, pH 7.3, 40 mM beta-glycerophosphate, 1 mM EGTA, 100 mM MgCl₂, 5 mM MnCl₂, 0.5 mg/ml BSA), then 5 ul of Sodium Vanadate (1 mM), and then 5 ul of water. Mix the components gently and preincubate the reaction mix at 30 degree C. for 2 min. Initial the reaction by adding 10 ul of the control enzyme or the filtered supernatant.

[1222] The tyrosine kinase assay reaction is then terminated by adding 10 ul of 120 mm EDTA and place the reactions on ice.

[1223] Tyrosine kinase activity is determined by transferring 50 ul aliquot of reaction mixture to a microtiter plate (MTP) module and incubating at 37 degree C. for 20 min. This allows the streptavidin coated 96 well plate to associate with the biotinylated peptide. Wash the MTP module with 300 ul/well of PBS four times. Next add 75 ul of anti-phospotyrosine antibody conjugated to horse radish peroxidase (anti-P-Tyr-POD(0.5 u/ml)) to each well and incubate at 37 degree C. for one hour. Wash the well as above.

[1224] Next add 100 ul of peroxidase substrate solution (Boehringer Mannheim) and incubate at room temperature for at least 5 mins (up to 30 min). Measure the absorbance of the sample at 405 nm by using ELUSA reader. The level of bound peroxidase activity is quantitated using an ELISA reader and reflects the level of tyrosine kinase activity.

### Example 36

### Assay Identifying Phosphorylation Activity

[1225] As a potential alternative and/or complement to the assay of protein tyrosine kinase activity described in Example 35, an assay which detects activation (phosphorylation) of major intracellular signal transduction intermediates can also be used. For example, as described below one particular assay can detect tyrosine phosphorylation of the Erk-1 and Erk-2 kinases. However, phosphorylation of other molecules, such as Raf, JNK, p38 MAP, Map kinase kinase (MEK), MEK kinase, Src, Muscle specific kinase (MuSK), IRAK, Tec, and Janus, as well as any other phosphoserine, phosphotyrosine, or phosphothreonine molecule, can be detected by substituting these molecules for Erk-1 or Erk-2 in the following assay.

[1226] Specifically, assay plates are made by coating the wells of a 96-well ELISA plate with 0.1 ml of protein G (1 ug/ml) for 2 hr at room temp, (RT). The plates are then rinsed with PBS and blocked with 3% BSA/PBS for 1 hr at RT. The protein G plates are then treated with 2 commercial monoclonal antibodies (10 ng/well) against Erk-1 and Erk-2 (1 hr at RT) (Santa Cruz Biotechnology). (To detect other molecules, this step can easily be modified by substituting a monoclonal antibody detecting any of the above described molecules.) After 3-5 rinses with PBS, the plates are stored at 4 degree C. until use.

[1227] A431 cells are seeded at 20,000/well in a 96-well Loprodyne filterplate and cultured overnight in growth medium. The cells are then starved for 48 hr in basal medium (DMEM) and then treated with EGF (6 ng/well) or varying concentrations of the fusion protein of the invention for 5-20 minutes. The cells are then solubilized and extracts filtered directly into the assay plate.

[1228] After incubation with the extract for 1 hr at RT, the wells are again rinsed. As a positive control, a commercial preparation of MAP kinase (10 ng/well) is used in place of A431 extract. Plates are then treated with a commercial polyclonal (rabbit) antibody (1 ug/ml) which specifically recognizes the phosphorylated epitope of the Erk-1 and Erk-2 kinases (1 hr at RT). This antibody is biotinylated by standard procedures. The bound polyclonal antibody is then quantitated by successive incubations with Europium-streptavidin and Europium fluorescence enhancing reagent in the Wallac DELFIA instrument (time-resolved fluorescence). An increased fluorescent signal over background indicates a phosphorylation by the fusion protein of the present invention or a molecule induced by an albumin fusion protein of the present invention.

### Example 37

### Assay for the Stimulation of Bone Marrow CD34+Cell Proliferation

[1229] This assay is based on the ability of human CD34+ to proliferate in the presence of hematopoietic growth factors and evaluates the ability of fusion proteins of the inventon to stimulate proliferation of CD34+ cells.

[1230] It has been previously shown that most mature precursors will respond to only a single signal. More immature precursors require at least two signals to respond. Therefore, to test the effect of fusion proteins of the invention on hematopoietic activity of a wide range of progenitor cells, the assay contains a given fusion protein of the invention in the presence or absence of hematopoietic growth factors. Isolated cells are cultured for 5 days in the presence of Stem Cell Factor (SCF) in combination with tested sample. SCF alone has a very limited effect on the proliferation of bone marrow (BM) cells, acting in such conditions only as a “survival” factor. However, combined with any factor exhibiting stimulatory effect on these cells (e.g., IL-3), SCF will cause a synergistic effect. Therefore, if the tested fusion protein has a stimulatory effect on hematopoietic progenitors, such activity can be easily detected. Since normal BM cells have a low level of cycling cells, it is likely that any inhibitory effect of a given fusion protein might not be detected. Accordingly, assays for an inhibitory effect on progenitors is preferably tested in cells that are fust subjected to in vitro stimulation with SCF+IL+3, and then contacted with the compound that is being evaluated for inhibition of such induced proliferation.

[1231] Briefly, CD34+ cells are isolated using methods known in the art. The cells are thawed and resuspended in medium (QBSF 60 serum-free medium with 1% L-glutamine (500 ml) Quality Biological, Inc., Gaithersburg, MD Cat#160-204-101). After several gentle centrifugation steps at 200×g, cells are allowed to rest for one hour. The cell count is adjusted to 2.5×10⁵ cells/ml. During this time, 100 μl of sterile water is added to the peripheral wells of a 96-well plate. The cytokines that can be tested with an albumin fusion protein of the invention in this assay is rhSCF (R&D Systems, Minneapolis, Minn., Cat#255-SC) at 50 ng/ml alone and in combination with rhSCF and rhIL-3 (R&D Systems, Minneapolis, Minn., Cat#203-ML) at 30 ng/ml. After one hour, 10 μl of prepared cytokines, varying concentrations of an albumin fusion protein of the invention, and 20 μl of diluted cells are added to the media which is already present in the wells to allow for a final total volume of 100 μl. The plates are then placed in a 37° C./5% CO₂ incubator for five days.

[1232] Eighteen hours before the assay is harvested, 0.5 μCi/well of [3H] Thymidine is added in a 10 μl volume to each well to determine the proliferation rate. The experiment is terminated by harvesting the cells from each 96-well plate to a filternat using the Tomtec Harvester 96. After harvesting, the filtermats are dried, trimmed and placed into OmniFilter assemblies consisting of one OmniFilter plate and one OmniFilter Tray. 60 μl Microscint is added to each well and the plate sealed with TopSeal-A press-on sealing film A bar code 15 sticker is affixed to the first plate for counting. The sealed plates are then loaded and the level of radioactivity determined via the Packard Top Count and the printed data collected for analysis. The level of radioactivity reflects the amount of cell proliferation.

[1233] The studies described in this example test the activity of a given fusion protein to stimulate bone marrow CD34+ cell proliferation. One skilled in the art could easily modify the exemplified studies to test the activity of fusion porteins and polynucleotides of the invention (e.g., gene therapy) as well as agonists and antagonists thereof. The ability of an albumin fusion protein of the invention to stimulate the proliferation of bone marrow CD34+ cells indicates that the albumin fusion protein and/or polynucleotides corresponding to the fusion protein are useful for the. diagnosis and treatment of disorders affecting the immune system and hematopoiesis. Representative uses are described in the “Immune Activity” and “Infectious Disease” sections above, and elsewhere herein.

### Example 38

### Assay for Extracellular Matrix Enhanced Cell Response (EMECR)

[1234] The objective of the Extracellular Matrix Enhanced Cell Response (EMECR) assay is to evaluate the ability of fusion proteins of the invention to act on hematopoietic stem cells in the context of the extracellular matrix (ECM) induced signal.

[1235] Cells respond to the regulatory factors in the context of signal(s) received from the surrounding microenvironment. For example, fibroblasts, and endothelial and epithelial stem cells fail to replicate in the absence of signals from the ECM. Hematopoietic stem cells can undergo self-renewal in the bone marrow, but not in in vitro suspension culture. The ability of stem cells to undergo self-renewal in vitro is dependent upon their interaction with the stromal cells and the ECM protein fibronectin (fn). Adhesion of cells to fn is mediated by the α₅.β₁ and α₄.β₁ integrin receptors, which are expressed by human and mouse hematopoietic stem cells. The factor(s) which integrate with the ECM environment and are responsible for stimulating stem cell self-renewal havea not yet been identified. Discovery of such factors should be of great interest in gene therapy and bone marrow transplant applications

[1236] Briefly, polystyrene, non tissue culture treated, 96-well plates are coated with fn fragment at a coating concentration of 0.2 μg/cm². Mouse bone marrow cells are plated (1,000 cells/well ) in 0.2 ml of serum-free medium. Cells cultured in the presence of IL-3 (5 ng/ml)+SCF (50 ng/ml ) would serve as the positive control, conditions under which little self-renewal but pronounced differentiation of the stem cells is to be expected. Albumin fusion proteins of the invention are tested with appropriate negative controls in the presence and absence of SCF(5.0 ng/ml), where volume of the administed composition containing the albumin fusion protein of the invention represents 10% of the total assay volume. The plated cells are then allowed to grow by incubating in a low oxygen environment (5% CO₂, 7% O₂, and 88% N₂) tissue culture incubator for 7 days. The number of proliferating cells within the wells is then quantitated by measuring thymidine incorporation into cellular DNA. Verification of the positive hits in the assay will require phenotypic characterization of the cells, which can be accomplished by scaling up of the culture system and using appropriate antibody reagents against cell surface antigens and FACScan.

[1237] One skilled in the art could easily modify the exemplified studies to test the activity of albumin fusion proteins and polynucleotides of the invention (e.g., gene therapy).

[1238] If a particular fusion protein of the present invention is found to be a stimulator of hematopoietic progenitors, the fusion protein and polynucleotides corresponding to the fusion protein may be useful for example, in the diagnosis and treatment of disorders affecting the immune system and hematopoiesis. Representative uses are described in the “Immune Activity” and “Infectious Disease” sections above, and elsewhere herein. The fusion protein may also be useful in the expansion of stem cells and committed progenitors of various blood lineages, and in the differentiation and/or proliferation of various cell types.

[1239] Additionally, the albumin fusion proteins of the invention and polynucleotides encoding albumin fusion proteins of the invention, may also be employed to inhibit the proliferation and differentiation of hematopoietic cells and therefore may be employed to protect bone marrow stem cells from chemotherapeutic agents during chemotherapy. This antiproliferative effect may allow administration of higher doses of chemotherapeutic agents and, therefore, more effective chemotherapeutic treatment.

[1240] Moreover, fusion proteins of the invention and polynucleotides encoding albumin fusion proteins of the invention may also be useful for the treatment and diagnosis of hematopoietic related disorders such as, anemia, pancytopenia, leukopenia, thrombocytopenia or leukemia, since stromal cells are important in the production of cells of hematopoietic lineages. The uses include bone marrow cell ex-vivo culture, bone marrow transplantation, bone marrow reconstitution, radiotherapy or chemotherapy of neoplasia.

### Example 39

### Human Dermal Fibroblast and Aortic Smooth Muscle Cell Proliferation

[1241] An albumin fusion protein of the invention is added to cultures of normal human dermal fibroblasts (NHDF) and human aortic smooth muscle cells (AoSMC) and two co-assays are performed with each sample. The first assay examines the effect of the fusion protein on the proliferation of normal human dermal fibroblasts (NHDF) or aortic smooth muscle cells (AoSMC). Aberrant growth of fibroblasts or smooth muscle cells is a part of several pathological processes, including fibrosis, and restenosis. The second assay examines IL6 production by both NHDF and SMC. IL6 production is an indication of functional activation. Activated cells will have increased production of a number of cytokines and other factors, which can result in a proinflammatory or immunomodulatory outcome. Assays are run with and without co-TNFa stimulation, in order to check for costimulatory or inhibitory activity.

[1242] Briefly, on day 1, 96-well black plates are set up with 1000 cells/well (NHDF) or 2000 cells/well (AoSMC) in 100 μl culture media. NHDF culture media contains: Clonetics FB basal media, 1 μg/ml hFGF, 5 mg/ml insulin, 50 mg/ml gentamycin, 2% FBS, while AoSMC culture media contains Clonetics SM basal media, 0.5 μg/ml hEGF, 5 mg/ml insulin, 1 μg/ml hFGF, 50 mg/ml gentamycin, 50 μg/ml Amphotericin B, 5% FBS. After incubation at 37° C. for at least 4-5 hours culture media is aspirated and replaced with growth arrest media. Growth arrest media for NHDF contains fibroblast basal media, 50 mg/ml gentamycin, 2% FBS, while growth arrest media for AoSMC contains SM basal media, 50 mg/ml gentamycin, 50 μg/ml Amphotericin B, 0.4% FBS. Incubate at 37° C. until day 2.

[1243] On day 2, serial dilutions and templates of an albumin fusion protein of the invention are designed such that they always include media controls and known-protein controls. For both stimulation and inhibition experiments, proteins are diluted in growth arrest media. For inhibition experiments, TNFa is added to a final concentration of 2 ng/ml (NHDF) or 5 ng/ml (AoSMC). Add ⅓ vol media containing controls or an albumin fusion protein of the invention and incubate at 37 degrees C./5% CO₂ until day 5.

[1244] Transfer 60 μl from each well to another labeled 96-well plate, cover with a plate-sealer, and store at 4 degrees C. until day 6 (for IL6 ELISA). To the remaining 100 μl in the cell culture plate, aseptically add Alamar Blue in an amount equal to 10% of the culture volume (10 μl). Return plates to incubator for 3 to 4 hours. Then measure fluorescence with excitation at 530 nm and emission at 590 nm using the CytoFluor. This yields the growth stimulation/inhibition data.

[1245] On day 5, the IL6 ELISA is performed by coating a 96 well plate with 50-100 ul/well of Anti-Human IL6 Monoclonal antibody diluted in PBS, pH 7.4, incubate ON at room temperature.

[1246] On day 6, empty the plates into the sink and blot on paper towels. Prepare Assay Buffer containing PBS with 4% BSA. Block the plates with 200 μl/well of Pierce Super Block blocking buffer in PBS for 1-2 hr and then wash plates with wash buffer (PBS, 0.005% Tween-20). Blot plates on paper towels. Then add 50 μl/well of diluted Anti-Human IL-6 Monoclonal, Biotin-labeled antibody at 0.50 mg/ml. Make dilutions of IL-6 stock in media (30, 10, 3, 1, 0.3, 0 ng/ml). Add duplicate samples to top row of plate. Cover the plates and incubate for 2 hours at RT on shaker.

[1247] Plates are washed with wash buffer and blotted on paper towels. Dilute EU-labeled Streptavidin 1:1000 in Assay buffer 100 μl/well. Cover the plate and incubate 1 h at RT. Plates are again washed with wash buffer and blotted on paper towels.

[1248] Add 100 μl/well of Enhancement Solution. Shake for 5 minutes. Read the plate on the Wallac DELFIA Fluorometer. Readings from triplicate samples in each assay were tabulated and averaged.

[1249] A positive result in this assay suggests AoSMC cell proliferation and that the albumin fusion protein may be involved in dermal fibroblast proliferation and/or smooth muscle cell proliferation. A positive result also suggests many potential uses of the fusion protein and polynucleotides encoding the albumin fusion protein. For example, inflammation and immune responses, wound healing, and angiogenesis, as detailed throughout this specification. Particularly, fusion proteins may be used in wound healing and dermal regeneration, as well as the promotion of vasculogenesis, both of the blood vessels and lymphatics. The growth of vessels can be used in the treatment of, for example, cardiovascular diseases. Additionally, fusion proteins showing antagonistic activity in this assay may be useful in treating diseases, disorders, and/or conditions which involve angiogenesis by acting as an anti-vascular agent (e.g., anti-angiogenesis). These diseases, disorders, and/or conditions are known in the art and/or are described herein, such as, for example, malignancies, solid tumors, benign tumors, for example hemangiomas, acoustic neuromas, neurofibromas, trachomas, and pyogenic granulomas; artheroscleric plaques; ocular angiogenic diseases, for example, diabetic retinopathy, retinopathy of prematurity, macular degeneration, corneal graft rejection, neovascular glaucoma, retrolental fibroplasia, rubeosis, retinoblastoma, uvietis and Pterygia (abnormal blood vessel growth) of the eye; rheumatoid arthritis; psoriasis; delayed wound healing; endometriosis; vasculogenesis; granulations; hypertrophic scars (keloids); nonunion fractures; scleroderma; trachoma; vascular adhesions; myocardial angiogenesis; coronary collaterals; cerebral collaterals; arteriovenous malformations; ischemic limb angiogenesis; Osler-Webber Syndrome; plaque neovascularization; telangiectasia; hemophiliac joints; angiofibroma; fibromuscular dysplasia; wound granulation; Crohn's disease; and atherosclerosis. Moreover, albumin fusion proteins that act as antagonists in this assay may be useful in treating anti-hyperproblferative diseases and/or anti-inflammatory known in the art and/or described herein.

### Example 40

### Cellular Adhesion Molecule (CAM) Expression on Endothelial Cells

[1250] The recruitment of lymphocytes to areas of inflammation and angiogenesis involves specific receptor-ligand interactions between cell surface adhesion molecules (CAMs) on lymphocytes and the vascular endothelium. The adhesion process, in both normal and pathological settings, follows a multi-step cascade that involves intercellular adhesion molecule-1 (ICAM-1), vascular cell adhesion molecule-1 (VCAM-1), and endothelial leukocyte adhesion molecule-1 (E-selectin) expression on endothelial cells (EC). The expression of these molecules and others on the vascular endothelium determines the efficiency with which leukocytes may adhere to the local vasculature and extravasate into the local tissue during the development of an inflammatory response. The local concentration of cytokines and growth factor participate in the modulation of the expression of these CAMs.

[1251] Briefly, endothelial cells (e.g., Human Umbilical Vein Endothelial cells (HUVECs)) are grown in a standard 96 well plate to confluence, growth medium is removed from the cells and replaced with 100 μl of 199 Medium (10% fetal bovine serum (FBS)). Samples for testing (containing an albumin fusion protein of the invention) and positive or negative controls are added to the plate in triplicate (in 10 μl volumes). Plates are then incubated at 37° C. for either 5 h (selectin and integrin expression) or 24 h (integrin expression only). Plates are aspirated to remove medium and 100 μl of 0.1% paraformaldehyde-PBS(with Ca++ and Mg++) is added to each well. Plates are held at 4° C. for 30 min. Fixative is removed from the wells and wells are washed 1× with PBS(+Ca,Mg)+0.5% BSA and drained. 10 μl of diluted primary antibody is added to the test and control wells. Anti-ICAM-1-Biotin, Anti-VCAM-1-Biotin and Anti-E-selectin-Biotin are used at a concentration of 10 μg/ml (1:10 dilution of 0.1 mg/ml stock antibody). Cells are incubated at 37° C. for 30 min. in a humidified environment. Wells are washed three times with PBS(+CaMg)+0.5% BSA. 20 μl of diluted ExtrAvidin-Alkaline Phosphatase (1:5,000 dilution, referred to herein as the working dilution) are added to each well and incubated at 37° C. for 30 min. Wells are washed three times with PBS(+Ca,Mg)+0.5% BSA. Dissolve 1 tablet of p-Nitrophenol Phosphate pNPP per 5 ml of glycine buffer (pH 10.4). 100 μl of pNPP substrate in glycine buffer is added to each test well. Standard wells in triplicate are prepared from the working dilution of the ExtrAvidin-Alkaline Phosphotase in glycine buffer: 1:5,000 (10⁰)>10^{-0.5}>10⁻¹>10^{-1.5}.5 μl of each dilution is added to triplicate wells and the resulting AP content in each well is 5.50 ng, 1.74 ng, 0.55 ng, 0.18 ng. 100 μl of pNNP reagent is then added to each of the standard wells. The plate is incubated at 37° C. for 4 h. A volume of 50 μl of 3M NaOH is added to all wells. The plate is read on a plate reader at 405 nm using the background subtraction option on blank wells filled with glycine buffer only. Additionally, the template is set up to indicate the concentration of AP-conjugate in each standard well [5.50 ng; 1.74 ng; 0.55 ng; 0.18 ng]. Results are indicated as amount of bound AP-conjugate in each sample.

### Example 41

### Alamar Blue Endothelial Cells Proliferation Assay

[1252] This assay may be used to quantitatively determine protein mediated inhibition of bFGF-induced proliferation of Bovine Lymphatic Endothelial Cells (LECs), Bovine Aortic Endothelial Cells (BAECs) or Human Microvascular Uterine Myometrial Cells (UTMECs). This assay incorporates a fluorometric growth indicator based on detection of metabolic activity. A standard Alamar Blue Proliferation Assay is prepared in EGM-2MV with 10 ng /ml of bFGF added as a source of endothelial cell stimulation. This assay may be used with a variety of endothelial cells with slight changes in growth medium and cell concentration. Dilutions of protein batches to be tested are diluted as appropriate. Serum-free medium (GIBCO SFM) without bFGF is used as a non-stimulated control and Angiostatin or TSP-1 are included as a known inhibitory controls.

[1253] Briefly, LEC, BAECs or UTMECs are seeded in growth media at a density of 5000 to 2000 cells/well in a 96 well plate and placed at 37 degrees C. overnight. After the overnight incubation of the cells, the growth media is removed and replaced with GiBCO EC-SFM. The cells are treated with the appropriate dilutions of an albumin fusion protein of the invention or control protein sample(s) (prepared in SFM) in triplicate wells with additional bFGF to a concentration of 10 ng/ml. Once the cells have been treated with the samples, the plate(s) is/are placed back in the 37° C. incubator for three days. After three days 10 ml of stock alamar blue (Biosource Cat#DAL1100) is added to each well and the plate(s) is/are placed back in the 37° C. incubator for four hours. The plate(s) are then read at 530 nm excitation and 590 nm emission using the CytoFluor fluorescence reader. Direct output is recorded in relative fluorescence units.

[1254] Alamar blue is an oxidation-reduction indicator that both fluoresces and changes color in response to chemical reduction of growth medium resulting from cell growth. As cells grow in culture, innate metabolic activity results in a chemical reduction of the immediate surrounding environment. Reduction related to growth causes the indicator to change from oxidized (non-fluorescent blue) form to reduced (fluorescent red) form (i.e., stimulated proliferation will produce a stronger signal and inhibited proliferation will produce a weaker signal and the total signal is proportional to the total number of cells as well as their metabolic activity). The background level of activity is observed with the starvation medium alone. This is compared to the output observed from the positive control samples (bFGF in growth medium) and protein dilutions.

### Example 42

### Detection of Inhibition of a Mixed Lymphocyte Reaction

[1255] This assay can be used to detect and evaluate inhibition of a Mixed Lymphocyte Reaction (MLR) by fusion proteins of the invention. Inhibition of a MLR may be due to a direct effect on cell proliferation and viability, modulation of costimulatory molecules on interacting cells, modulation of adhesiveness between lymphocytes and accessory cells, or modulation of cytokine production by accessory cells. Multiple cells may be targeted by the albumin fusion proteins that inhibit MLR since the peripheral blood mononuclear fraction used in this assay includes T, B and natural killer lymphocytes, as well as monocytes and dendritic cells.

[1256] Albumin fusion proteins of the invention found to inhibit the MLR may find application in diseases associated with lymphocyte and monocyte activation or proliferation. These include, but are not limited to, diseases such as asthma, arthritis, diabetes, inflammatory skin conditions, psoriasis, eczema, systemic lupus erythematosus, multiple sclerosis, glomerulonephritis, inflammatory bowel disease, crohn's disease, ulcerative colitis, arteriosclerosis, cirrhosis, graft vs. host disease, host vs. graft disease, hepatitis, leukemia and lymphoma.

[1257] Briefly, PBMCs from human donors are purified by density gradient centrifugation using Lymphocyte Separation Medium (LSM®, density 1.0770 g/ml, Organon Teknika Corporation, West Chester, Pa.). PBMCs from two donors are adjusted to 2×10⁶ cells/ml in RPMI-1640 (Life Technologies, Grand Island, N.Y.) supplemented with 10% FCS and 2 mM glutamine. PBMCs from a third donor is adjusted to a 2×10⁵ cells/ml. Fifty microliters of PBMCs from each donor is added to wells of a 96-well round bottom microtiter plate. Dilutions of the fusion protein test material (50 μl) is added in triplicate to microtiter wells. Test samples (of the protein of interest) are added for final dilution of 1:4; rhuIL-2 (R&D Systems, Minneapolis, Minn., catalog number 202-IL) is added to a final concentration of 1 μg/ml; anti-CD4 mAb (R&D Systems, clone 34930.11, catalog number MAB379) is added to a final concentration of 10 μg/ml. Cells are cultured for 7-8 days at 37° C. in 5% CO₂, and 1 μC of [³H] thymidine is added to wells for the last 16 hrs of culture. Cells are harvested and thymidine incorporation determined using a Packard TopCount. Data is expressed as the mean and standard deviation of triplicate determinations.

[1258] Samples of the fusion protein of interest are screened in separate experiments and compared to the negative control treatment, anti-CD4 mAb, which inhibits proliferation of lymphocytes and the positive control treatment, IL-2 (either as recombinant material or supernatant), which enhances proliferation of lymphocytes.

### Example 43

### Assays for Protease Activity

[1259] The following assay may be used to assess protease activity of an albumin fusion protein of the invention.

[1260] Gelatin and casein zymography are performed essentially as described (Heusen et al., Anal. Biochem., 102:196-202 (1980); Wilson et al., Journal of Urology, 149:653-658 (1993)). Samples are run on 10% polyacryamide/0.1% SDS gels containing 1% gelatin orcasein, soaked in 2.5% triton at room temperature for 1 hour, and in 0.1M glycine, pH 8.3 at 37° C. 5 to 16 hours. After staining in amido black areas of proteolysis apear as clear areas agains the blue-black background. Trypsin (Sigma T8642) is used as a positive control.

[1261] Protease activity is also determined by monitoring the cleavage of n-a-benzoyl-L-arginine ethyl ester (BAEE) (Sigma B4500, Reactions are set up in (25 mMNaPO₄, 1 mM EDTA, and 1 mM BAEE), pH 7.5. Samples are added and the change in adsorbance at 260 nm is monitored on the Beckman DU-6 spectrophotometer in the time-drive mode. Trypsin is used as a positive control.

[1262] Additional assays based upon the release of acid-soluble peptides from casein or hemoglobin measured as adsorbance at 280 nm or colorimetrically using the Folin method are performed as described in Bergmeyer, et al., Methods of Enzymatic Analysis, 5 (1984). Other assays involve the solubilization of chromogenic substrates (Ward, Applied Science, 251-317 (1983)).

### Example 44

### Identifying Serine Protease Substrate Specificity

[1263] Methods known in the art or described herein may be used to determine the substrate specificity of the albumin fusion proteins of the present invention having serine protease activity. A preferred method of determining substrate specificity is by the use of positional scanning synthetic combinatorial libraries as described in GB 2 324 529 (incorporated herein in its entirety).

### Example 45

### Ligand Binding Assays

[1264] The following assay may be used to assess ligand binding activity of an albumin fusion protein of the invention.

[1265] Ligand binding assays provide a direct method for ascertaining receptor pharmacology and are adaptable to a high throughput format. The purified ligand for an albumin fusion protein of the invention is radiolabeled to high specific activity (50-2000 Ci/mmol) for binding studies. A determination is then made that the process of radiolabeling does not diminish the activity of the ligand towards the fusion protein. Assay conditions for buffers, ions, pH and other modulators such as nucleotides are optimized to establish a workable signal to noise ratio for both membrane and whole cell polypeptide sources. For these assays, specific polypeptide binding is defined as total associated radioactivity minus the radioactivity measured in the presence of an excess of unlabeled competing ligand. Where possible, more than one competing ligand is used to define residual nonspecific binding.

### Example 46

### Functional Assay in Xenopus Oocytes

[1266] Capped RNA transcripts from linearized plasmid templates encoding an albumin fusion protein of the invention is synthesized in vitro with RNA polymerases in accordance with standard procedures. In vitro transcripts are suspended in water at a final concentration of 0.2 mg/mi. Ovarian lobes are removed from adult female toads, Stage V defolliculated oocytes are obtained, and RNA transcripts (10 ng/oocyte) are injected in a 50 nl bolus using a microinjection apparatus. Two electrode voltage clamps are used to measure the currents from individual Xenopus oocytes in response fusion protein and polypeptide agonist exposure. Recordings are made in Ca2+ free Barth's medium at room temperature. The Xenopus system can be used to screen known ligands and tissue/cell extracts for activating ligands.

### Example 47

### Microphysiometric Assays

[1267] Activation of a wide variety of secondary messenger systems results in extrusion of small amounts of acid from a cell. The acid formed is largely as a result of the increased metabolic activity required to fuel the intracellular signaling process. The pH changes in the media surrounding the cell are very small but are detectable by the CYTOSENSOR microphysiometer (Molecular Devices Ltd., Menlo Park, Calif.). The CYTOSENSOR is thus capable of detecting the ability of an albumin fusion protein of the invention to activate secondary messengers that are coupled to an energy utilizing intracellular signaling pathway.

### Example 48

### Extract/Cell Supernatant Screening

[1268] A large number of mammalian receptors exist for which there remains, as yet, no cognate activating ligand (agonist). Thus, active ligands for these receptors may not be included within the ligands banks as identified to date. Accordingly, the albumin fusion proteins of the invention can also be functionally screened (using calcium, cAMP, microphysiometer, oocyte electrophysiology, etc., functional screens) against tissue extracts to identify natural ligands for the Therapeutic protein portion and/or albumin protein portion of an albumin fusion protein of the invention. Extracts that produce positive functional responses can be sequentially subfractionated until an activating ligand is isolated and identified.

### Example 49

### ATP-Binding Assay

[1269] The following assay may be used to assess ATP-binding activity of fusion proteins of the invention.

[1270] ATP-binding activity of an albumin fusion protein of the invention may be detected using the ATP-binding assay described in U.S. Pat. No. 5,858,719, which is herein incorporated by reference in its entirety. Briefly, ATP-binding to an albumin fusion protein of the invention is measured via photoaffinity labeling with 8-azido-ATP in a competition assay. Reaction mixtures containing 1 mg/ml of ABC transport protein are incubated with varying concentrations of ATP, or the non-hydrolyzable ATP analog adenyl-5′-imidodiphosphate for 10 minutes at 4° C. A mixture of 8-azido-ATP (Sigma Chem. Corp., St. Louis, Mo.) plus 8-azido-ATP (³²P-ATP) (5 mCi/μmol, ICN, Irvine, Calif.) is added to a final concentration of 100 μM and 0.5 ml aliquots are placed in the wells of a porcelain spot plate on ice. The plate is irradiated using a short wave 254 nm UV lamp at a distance of 2.5 cm from the plate for two one-minute intervals with a one-minute cooling interval in between. The reaction is stopped by addition of dithiothreitol to a final concentration of 2 mM. The incubations are subjected to SDS-PAGE electrophoresis, dried, and autoradiographed. Protein bands corresponding to the albumin fusion proteins of the invention are excised, and the radioactivity quantified. A decrease in radioactivity with increasing ATP or adenly-5′-imidodiphosphate provides a measure of ATP affinity to the fusion protein.

### Example 50

### Phosphorylation Assay

[1271] In order to assay for phosphorylation activity of an albumin fusion protein of the invention, a phosphorylation assay as described in U.S. Pat. No. 5,958,405 (which is herein incorporated by reference) is utilized. Briefly, phosphorylation activity may be measured by phosphorylation of a protein substrate using gamma-labeled ³²P-ATP and quantitation of the incorporated radioactivity using a gamma radioisotope counter. The fusion portein of the invention is incubated with the protein substrate, ³²P-ATP, and a kinase buffer. The ³²P incorporated into the substrate is then separated from free ³²P-ATP by electrophoresis, and the incorporated ³²P is counted and compared to a negative control. Radioactivity counts above the negative control are indicative of phosphorylation activity of the fusion protein.

### Example 51

### Detection of Phosphorylation Activity (Activation) of an Albumin Fusion Protein of the Invention in the Presence of Polypeptide Ligands

[1272] Methods known in the art or described herein may be used to determine the phosphorylation activity of an albumin fusion protein of the invention. A preferred method of determining phosphorylation activity is by the use of the tyrosine phosphorylation assay as described in U.S. Pat. No. 5,817,471 (incorporated herein by reference).

### Example 52

### Identification Of Signal Transduction Proteins That Interact With An Albumin Fusion Protein Of The Present Invention

[1273] Albumin fusion proteins of the invention may serve as research tools for the identification, characterization and purification of signal transduction pathway proteins or receptor proteins. Briefly, a labeled fusion protein of the invention is useful as a reagent for the purification of molecules with which it interacts. In one embodiment of affinity purification, an albumin fusion protein of the invention is covalently coupled to a chromatography column. Cell-free extract derived from putative target cells, such as carcinoma tissues, is passed over the column, and molecules with appropriate affinity bind to the albumin fusion protein. The protein complex is recovered from the column, dissociated, and the recovered molecule subjected to N-terminal protein sequencing. This amino acid sequence is then used to identify the captured molecule or to design degenerate oligonucleotide probes for cloning the relevant gene from an appropriate cDNA library.

### Example 53

### IL-6 Bioassay

[1274] A variety of assays are known in the art for testing the proliferative effects of an albumin fusion protein of the invention. For example, one such asssay is the IL-6 Bioassay as described by Marz et al. (Proc. Natl. Acad Sci., U.S.A., 95:3251-56 (1998), which is herein incorporated by reference). After 68 hrs. at 37° C., the number of viable cells is measured by adding the tetrazolium salt thiazolyl blue (MTT) and incubating for a further 4 hrs. at 37° C. B9 cells are lysed by SDS and optical density is measured at 570 nm. COntrols containing IL-6 (positive) and no cytokine (negative) are Briefly, IL-6 dependent B9 murine cells are washed three times in IL-6 free medium and plated at a concentration of 5,000 cells per well in 50 μl, and 50 μl of fusion protein of the invention is added utilized. Enhanced proliferation in the test sample(s) (containing an albumin fusion protein of the invention) relative to the negative control is indicative of proliferative effects mediated by the fusion protein.

### Example 54

### Support of Chicken Embryo Neuron Survival

[1275] To test whether sympathetic neuronal cell viability is supported by an albumin fusion protein of the invention, the chicken embryo neuronal survival assay of Senaldi et al may be utilized (Proc. Natl. Acad. Sci., U.S.A., 96:11458-63 (1998), which is herein incorporated by reference). Briefly, motor and sympathetic neurons are isolated from chicken embryos, resuspended in L15 medium (with 10% FCS, glucose, sodium selenite, progesterone, conalbumin, putrescine, and insulin; Life Technologies, Rockville, Md.) and Dulbecco's modified Eagles medium [with 10% FCS, glutamine, penicillin, and 25 mM Hepes buffer (pH 7.2); Life Technologies, Rockville, Md.], respectively, and incubated at 37° C. in 5% CO₂ in the presence of different concentrations of the purified fusion protein of the invention, as well as a negative control lacking any cytokine. After 3 days, neuron survival is determined by evaluation of cellular morphology, and through the use of the colorimetric assay of Mosmann (Mosmann, T., J. Immunol. Methods, 65:55-63 (1983)). Enhanced neuronal cell viability as compared to the controls lacking cytokine is indicative of the ability of the albumin fusion protein to enhance the survival of neuronal cells.

### Example 55

### Assay for Phosphatase Activity

[1276] The following assay may be used to assess serine/threonine phosphatase (PTPase) activity of an albumin fusion protein of the invention.

[1277] In order to assay for serine/threonine phosphatase (PTPase) activity, assays can be utilized which are widely known to those skilled in the art. For example, the serine/threonine phosphatase (PSPase) activity of an albumin fusion protein of the invention may be measured using a PSPase assay kit from New England Biolabs, Inc. Myelin basic protein (MyBP), a substrate for PSPase, is phosphorylated on serine and threonine residues with cAMP-dependent Protein Kinase in the presence of [³²P]ATP. Protein serine/threonine phosphatase activity is then determined by measuring the release of inorganic phosphate from 32P-labeled MyBP.

### Example 56

### Interaction of Serine/Threonine Phosphatases with Other Proteins

[1278] Fusion protein of the invention having serine/threonine phosphatase activity (e.g., as determined in Example 55) are useful, for example, as research tools for the identification, characterization and purification of additional interacting proteins or receptor proteins, or other signal transduction pathway proteins. Briefly, a labeled fusion protein of the invention is useful as a reagent for the purification of molecules with which it interacts. In one embodiment of affinity purification, an albumin fusion protein of the invention is covalently coupled to a chromatography column. Cell-free extract derived from putative target cells, such as neural or liver cells, is passed over the column, and molecules with appropriate affinity bind to the fusion protein. The fusion protein -complex is recovered from the column, dissociated, and the recovered molecule subjected to N-terminal protein sequencing. This amino acid sequence is then used to identify the captured molecule or to design degenerate oligonucleotide probes for cloning the relevant gene from an appropriate cDNA library.

### Example 57

### Assaying for Heparanase Activity

[1279] There a numerous assays known in the art that may be employed to assay for heparanase activity of an albumin fusion protein of the invention. In one example, heparanase activity of an albumin fusion protein of the invention, is assayed as described by Vlodavsky et al., (Vlodavsky et al., Nat. Med., 5:793-802 (1999)). Briefly, cell lysates, conditioned media, intact cells (1×10⁶ cells per 35-mm dish), cell culture supernatant, or purified fusion protein are incubated for 18 hrs at 37° C., pH 6.2-6.6, with ³⁵S-labeled ECM or soluble ECM derived peak I proteoglycans. The incubation medium is centrifuged and the supernatant is analyzed by gel filtration on a Sepharose CL-6B column (0.9×30 cm). Fractions are eluted with PBS and their radioactivity is measured. Degradation fragments of heparan sulfate side chains are eluted from Sepharose 6B at 0.5<Kₐᵥ<0.8 (peak II). Each experiment is done at least three times. Degradation corresponding to “peak II,” as described by Vlodavsky et al., is indicative of the activity of an albumin fusion protein of the invention in cleaving heparan sulfate.

### Example 58

### Immobilization of Biomolecules

[1280] This example provides a method for the stabilization of an albumin fusion protein of the invention in non-host cell lipid bilayer constucts (see, e.g., Bieri et al., Nature Biotech 17:1105-1108 (1999), hereby incorporated by reference in its entirety herein) which can be adapted for the study of fusion proteins of the invention in the various functional assays described above. Briefly, carbohydrate-specific chemistry for biotinylation is used to confine a biotin tag to an albumin fusion protein of the invention, thus allowing uniform orientation upon immobilization. A 50 uM solution of an albumin fusion protein of the invention in washed membranes is incubated with 20 mM NaIO4 and 1.5 mg/ml (4 mM) BACH or 2 mg/ml (7.5 mM) biotin-hydrazide for 1 hr at room temperature (reaction volume, 150 ul). Then the sample is dialyzed (Pierce Slidealizer Cassett, 10 kDa cutoff; Pierce Chemical Co., Rockford Ill.) at 4 C. first for 5 h, exchanging the buffer after each hour, and finally for 12 h against 500 ml buffer R (0.15 M NaCl, 1 mM MgC12, 10 mM sodium phosphate, pH 7). Just before addition into a cuvette, the sample is diluted 1:5 in buffer ROG50 (Buffer R supplemented with 50 mM octylglucoside).

### Example 59

### Assays for Metalloproteinase Activity

[1281] Metalloproteinases are peptide hydrolases which use metal ions, such as Zn²⁺, as the catalytic mechanism. Metalloproteinase activity of an albumin fusion protein of the present invention can be assayed according to methods known in the art. The following exemplary methods are provided:

[1282] Proteolysis of Alpha-2-Macroglobulin

[1283] To confirm protease activity, a purified fusion protein of the invention is mixed with the substrate alpha-2-macroglobulin (0.2 unit/ml; Boehringer Mannheim, Germany) in 1× assay buffer (50 mM HEPES, pH 7.5, 0.2 M NaCl, 10 mM CaCl₂, 25 μM ZnCl₂ and 0.05% Brij-35) and incubated at 37° C. for 1-5 days. Trypsin is used as positive control. Negative controls contain only alpha-2-macroglobulin in assay buffer. The samples are collected and boiled in SDS-PAGE sample buffer containing 5% 2-mercaptoethanol for 5-min, then loaded onto 8% SDS-polyacrylamide gel. After electrophoresis the proteins are visualized by silver staining. Proteolysis is evident by the appearance of lower molecular weight bands as compared to the negative control.

[1284] Inhibition of Alpha-2-Macroglobulin Proteolysis by Inhibitors of Metalloproteinases

[1285] Known metalloproteinase inhibitors (metal chelators (EDTA, EGTA, AND HgCl2), peptide metalloproteinase inhibitors (TIMP-1 and TIMP-2), and commercial small molecule MMP inhibitors) may also be used to characterize the proteolytic activity of an albumin fusion protein of the invention. Three synthetic MMP inhibitors that may be used are: MMP inhibitor I, [IC₅₀=1.0 μM against MMP-1 and MMP-8; IC₅₀=30 μM against MMP-9; IC₅₀=150 μM against MMP-3]; MMP-3 (stromelysin-1) inhibitor I [IC₅₀=1.0 μM against MMP-3], and MMP-3 inhibitor II [Kᵢ=130 nM against MMP-3]; inhibitors available through Calbiochem, catalog #444250, 444218, and 444225, respectively). Briefly, different concentrations of the small molecule MMP inhibitors are mixed with a purified fusion protein of the invention (50 μg/ml) in 22.9 μl of 1× HEPES buffer (50 mM HEPES, pH 7.5, 0.2 M NaCl, 10 mM CaCl₂, 25 μM ZnCl₂ and 0.05% Brij-35) and incubated at room temperature (24° C.) for 2-hr, then 7.1 μl of substrate alpha-2-macroglobulin (0.2 unit/ml) is added and incubated at 37° C. for 20-hr. The reactions are stopped by adding 4× sample buffer and boiled immediately for 5 minutes. After SDS-PAGE, the protein bands are visualized by silver stain.

[1286] Synthetic Fluorogenic Peptide Substrates Cleavage Assay

[1287] The substrate specificity for fusion proteins of the invention with demonstrated metalloproteinase activity may be determined using techniques knonw in the art, such as using synthetic fluorogenic peptide substrates (purchased from BACHEM Bioscience Inc). Test substrates include, M-1985, M-2225, M-2105, M-2110, and M-2255. The first four are MMP substrates and the last one is a substrate of tumor necrosis factor-α (TNF-α) converting enzyme (TACE). These substrastes are preferably prepared in 1:1 dimethyl sulfoxide (DMSO) and water. The stock solutions are 50-500 μM. Fluorescent assays are performed by using a Perkin Elmer LS 50B luminescence spectrometer equipped with a constant temperature water bath. The excitation λ is 328 nm and the emission λ is 393 nm. Briefly, the assay is carried out by incubating 176 μl 1× HEPES buffer (0.2 M NaCl, 10 mM CaCl₂, 0.05% Brij-35 and 50 mM HEPES, pH 7.5) with 4 μl of substrate solution (50 μM) at 25° C. for 15 minutes, and then adding 20 μl of a purified fusion protein of the invention into the assay cuvett. The final concentration of substrate is 1 μM. Initial hydrolysis rates are monitored for 30-min.

### Example 60

### Identification and Cloning of VH and VL Domains

[1288] One method to identfy and clone VH and VL domains from cell lines expressing a particular antibody is to perform PCR with VH and VL specific primers on cDNA made from the antibody expressing cell lines. Briefly, RNA is isolated from the cell lines and used as a template for RT-PCR designed to amplify the VH and VL domains of the antibodies expressed by the EBV cell lines. Cells may be lysed in the TRIzol® reagent (Life Technologies, Rockville, Md.) and extracted with one fifth volume of chloroform. After addition of chloroform, the solution is allowed to incubate at room temperature for 10 minutes, and the centrifuged at 14,000 rpm for 15 minutes at 4° C. in a tabletop centrifuge. The supernatant is collected and RNA is precipitated using an equal volume of isopropanol. Precipitated RNA is pelleted by centrifuging at 14,000 rpm for 15 minutes at 4° C. in a tabletop centrifuge. Following centrifugation, the supernatant is discarded and washed with 75% ethanol. Follwing washing, the RNA is centrifuged again at 800 rpm for 5 minutes at 4° C. The supernatant is discarded and the pellet allowed to air dry. RNA is the dissolved in DEPC water and heated to 60° C. for 10 minutes. Quantities of RNA can determined using optical density measurements.

[1289] cDNA may be synthesized, according to methods well-known in the art, from 1.5-2.5 micrograms of RNA using reverse transciptase and random hexamer primers. cDNA is then used as a template for PCR amplification of VH and VL domains. Primers used to amplify VH and VL genes are shown in Table 3. Typically a PCR reaction makes use of a single 5′ primer and a single 3′ primer. Sometimes, when the amount of available RNA template is limiting, or for greater efficiency, groups of 5′ and/or 3′ primers may be used. For example, sometimes all five VH-5′ primers and all JH3′ primers are used in a single PCR reaction. The PCR reaction is carried out in a 50 microliter volume containing 1×PCR buffer, 2 mM of each dNTP, 0.7 units of High Fidelity Taq polymerse, 5′ primer mix, 3′ primer mix and 7.5 microliters of cDNA. The 5′ and 3′ primer mix of both VH and VL can be made by pooling together 22 pmole and 28 pmol, respectively, of each of the individual primers. PCR conditions are: 96° C. for 5 minutes; followed by 25 cycles of 94° C. for 1 minute, 50° C. for 1 minute, and 72° C. for 1 minute; followed by an extension cycle of 72° C. for 10 minutes. After the reaction is completed, sample tubes are stored 4° C.

TABLE 3

Primer Sequences Used to Amplify
VH and VL domains.

| | | |
|---|---|---|
| Primer name | SEQ ID NO | Primer Sequence (5′-3′) |

VH Primers

| | | |
|---|---|---|
| Hu VH1-5′ | 36 | CAGGTGCAGCTGGTGCAGTCTGG |
| Hu VH2-5′ | 37 | CAGGTCAACTTAAGGGAGTCTGG |
| Hu VH3-5′ | 38 | GAGGTGCAGCTGGTGGAGTCTGG |
| Hu VH4-5′ | 39 | CAGGTGCAGCTGCAGGAGTCGGG |
| Hu VH5-5′ | 40 | GAGGTGCAGCTGTTGCAGTCTGC |
| Hu VH6-5′ | 41 | CAGGTACAGCTGCAGCAGTCAGG |
| Hu JH1,2-5′ | 42 | TGAGGAGACGGTGACCAGGGTGCC |
| Hu JH3-5′ | 43 | TGAAGAGACGGTGACCATTGTCCC |
| Hu JH4,5-5′ | 44 | TGAGGAGACGGTGACCAGGGTTCC |
| Hu JH6-5′ | 45 | TGAGGAGACGGTGACCGTGGTCCC |

VL Primers

| | | |
|---|---|---|
| Hu Vkappa1-5′ | 46 | GACATCCAGATGACCCAGTCTCC |
| Hu Vkappa2a-5′ | 47 | GATGTTGTGATGACTCAGTCTCC |
| Hu Vkappa2b-5′ | 48 | GATATTGTGATGACTCAGTCTCC |
| Hu Vkappa3-5′ | 49 | GAAATTGTGTTGACGCAGTCTCC |
| Hu Vkappa4-5′ | 50 | GACATCGTGATGACCCAGTCTCC |
| Hu Vkappa5-5′ | 51 | GAAACGACACTCACGCAGTCTCC |
| Hu Vkappa6-5′ | 52 | GAAATTGTGCTGACTCAGTCTCC |
| Hu Vlambda1-5′ | 53 | CAGTCTGTGTTGACGCAGCCGCC |
| Hu Vlambda2-5′ | 54 | CAGTCTGCCCTGACTCAGCCTGC |
| Hu Vlambda3-5′ | 55 | TCCTATGTGCTGACTCAGCCACC |
| Hu Vlambda3b-5′ | 56 | TCTTCTGAGCTGACTCAGGACCC |
| Hu Vlambda4-5′ | 57 | CACGTTATACTGACTCAACCGCC |
| Hu Vlambda5-5′ | 58 | CAGGCTGTGCTCACTCAGCCGTC |
| Hu Vlambda6-5′ | 59 | AATTTTATGCTGACTCAGCCCCA |
| Hu Jkappa1-3′ | 60 | ACGTTTGATTTCCACCTTGGTCCC |
| Hu Jkappa2-3′ | 61 | ACGTTTGATCTCCAGCTTGGTCCC |
| Hu Jkappa3-3′ | 62 | ACGTTTGATATCCACTTTGGTCCC |
| Hu Jkappa4-3′ | 63 | ACGTTTGATCTCCACCTTGGTCCC |
| Hu Jkappa5-3′ | 64 | ACGTTTAATCTCCAGTCGTGTCCC |
| Hu Jlambda1-3′ | 65 | CAGTCTGTGTTGACGCAGCCGCC |
| Hu Jlambda2-3′ | 66 | CAGTCTGCCCTGACTCAGCCTGC |
| Hu Jlambda3--3′ | 67 | TCCTATGTGCTGACTCAGCCACC |
| Hu Jlambda3b-3′ | 68 | TCTTCTGAGCTGACTCAGGACCC |
| Hu Jlambda4-3′ | 69 | CACGTTATACTGACTCAACCGCC |
| Hu Jlambda5-3′ | 70 | CAGGCTGTGCTCACTCAGCCGTC |
| Hu Jlambda6-3′ | 71 | AATTTTATGCTGACTCAGCCCCA |

[1290] PCR samples are then electrophoresed on a 1.3% agarose gel. DNA bands of the expected sizes (˜506 base pairs for VH domains, and 344 base pairs for VL domains) can be cut out of the gel and purified using methods well known in the art. Purified PCR products can be ligated into a PCR cloning vector (TA vector from Invitrogen Inc., Carlsbad, Calif.). Individual cloned PCR products can be isolated after transfection of E. coli and blue/white color selection. Cloned PCR products may then be sequenced using methods commonly known in the art.

[1291] The PCR bands containing the VH domain and the VL domains can also be used to create full-length Ig expression vectors. VH and VL domains can be cloned into vectors containing the nucleotide sequences of a heavy (e.g., human IgG1 or human IgG4) or light chain (human kappa or human lambda) constant regions such that a complete heavy or light chain molecule could be expressed from these vectors when transfected into an appropriate host cell. Further, when cloned heavy and light chains are both expressed in one cell line (from either one or two vectors), they can assemble into a complete functional antibody molecule that is secreted into the cell culture medium. Methods using polynucleotides encoding VH and VL antibody domain to generate expression vectors that encode complete antibody molecules are well known within the art.

[1292] It will be clear that the invention may be practiced otherwise than as particularly described in the foregoing description and examples. Numerous modifications and variations of the present invention are possible in light of the above teachings and, therefore, are within the scope of the appended claims.

[1293] The entire disclosure of each document cited (including patents, patent applications, patent publications, journal articles, abstracts, laboratory manuals, books, or other disclosures) as well as information available through Identifiers specific to databases such as GenBank, GeneSeq, or the CAS Registry, referred to in this application are herein incorporated by reference in their entirety. The specification and sequence listing of each of the following U.S. applications are herein incorporated by reference in their entirety:

| Appl Number | File Date | Appl Number | File Date |
|---|---|---|---|
| 60/047,599 | 23-May-1997 | US00/06824 | 16-Mar-2000 |
| 60/043,576 | 11-Apr-1997 | 60/126,051 | 23-Mar-1999 |
| 60/043,578 | 11-Apr-1997 | 60/169,906 | 10-Dec-1999 |
| 60/043,568 | 11-Apr-1997 | US00/06765 | 16-Mar-2000 |
| 60/040,162 | 07-Mar-1997 | 60/125,362 | 19-Mar-1999 |
| 60/047,601 | 23-May-1997 | US00/06792 | 16-Mar-2000 |
| 60/047,632 | 23-May-1997 | 60/169,980 | 10-Dec-1999 |
| 60/047,595 | 23-May-1997 | US00/06830 | 16-Mar-2000 |
| 60/056,845 | 22-Aug-1997 | 60/125,361 | 19-Mar-1999 |
| 60/056,664 | 22-Aug-1997 | 60/169,910 | 10-Dec-1999 |
| 60/056,892 | 22-Aug-1997 | 60/125,812 | 23-Mar-1999 |
| 60/056,632 | 22-Aug-1997 | 60/169,936 | 10-Dec-1999 |
| 60/043,580 | 11-Apr-1997 | US00/06782 | 16-Mar-2000 |
| 60/043,314 | 11-Apr-1997 | 60/126,054 | 23-Mar-1999 |
| 60/056,631 | 22-Aug-1997 | US00/06822 | 16-Mar-2000 |
| 60/043,674 | 11-Apr-1997 | 60/169,916 | 10-Dec-1999 |
| 60/043,670 | 11-Apr-1997 | US00/06791 | 16-Mar-2000 |
| 60/043,569 | 11-Apr-1997 | 60/169,946 | 10-Dec-1999 |
| 60/043,671 | 11-Apr-1997 | 60/125,815 | 23-Mar-1999 |
| 60/047,596 | 23-May-1997 | 60/125,358 | 19-Mar-1999 |
| 60/056,876 | 22-Aug-1997 | US00/06828 | 16-Mar-2000 |
| 60/047,612 | 23-May-1997 | 60/169,616 | 08-Dec-1999 |
| 60/047,588 | 23-May-1997 | 60/125,364 | 19-Mar-1999 |
| 60/056,864 | 22-Aug-1997 | 60/169,623 | 08-Dec-1999 |
| 60/043,311 | 11-Apr-1997 | US00/06823 | 16-Mar-2000 |
| 60/040,333 | 07-Mar-1997 | 60/169,617 | 08-Dec-1999 |
| 60/043,312 | 11-Apr-1997 | US00/06781 | 16-Mar-2000 |
| 60/056,909 | 22-Aug-1997 | 60/125,363 | 19-Mar-1999 |
| 60/056,910 | 22-Aug-1997 | 60/172,410 | 17-Dec-1999 |
| 60/056,636 | 22-Aug-1997 | 60/126,502 | 26-Mar-1999 |
| 60/047,586 | 23-May-1997 | US00/07505 | 22-Mar-2000 |
| 60/043,315 | 11-Apr-1997 | 60/126,503 | 26-Mar-1999 |
| 60/043,669 | 11-Apr-1997 | 60/172,409 | 17-Dec-1999 |
| 60/043,672 | 11-Apr-1997 | US00/07440 | 22-Mar-2000 |
| 60/047,585 | 23-May-1997 | 60/126,505 | 26-Mar-1999 |
| 60/047,598 | 23-May-1997 | 60/172,412 | 17-Dec-1999 |
| 60/056,874 | 22-Aug-1997 | US00/07506 | 22-Mar-2000 |
| 60/047,582 | 23-May-1997 | 60/126,594 | 26-Mar-1999 |
| 60/056,881 | 22-Aug-1997 | 60/172,408 | 17-Dec-1999 |
| 60/043,313 | 11-Apr-1997 | US00/07507 | 22-Mar-2000 |
| 60/047,613 | 23-May-1997 | 60/172,413 | 17-Dec-1999 |
| 60/038,621 | 07-Mar-1997 | US00/07535 | 22-Mar-2000 |
| 60/040,161 | 07-Mar-1997 | 60/126,511 | 26-Mar-1999 |
| 60/056,911 | 22-Aug-1997 | 60/126,595 | 26-Mar-1999 |
| 60/047,492 | 23-May-1997 | 60/171,549 | 22-Dec-1999 |
| 60/047,584 | 23-May-1997 | US00/07525 | 22-Mar-2000 |
| 60/047,500 | 23-May-1997 | 60/171,504 | 22-Dec-1999 |
| 60/047,587 | 23-May-1997 | 60/126,598 | 26-Mar-1999 |
| 60/056,880 | 22-Aug-1997 | US00/07534 | 22-Mar-2000 |
| 60/056,894 | 22-Aug-1997 | US00/07483 | 22-Mar-2000 |
| 60/056,879 | 22-Aug-1997 | 60/171,552 | 22-Dec-1999 |
| 60/047,590 | 23-May-1997 | 60/126,596 | 26-Mar-1999 |
| 60/047,581 | 23-May-1997 | 60/126,600 | 26-Mar-1999 |
| 60/047,592 | 23-May-1997 | US00/07526 | 22-Mar-2000 |
| 60/056,637 | 22-Aug-1997 | 60/171,550 | 22-Dec-1999 |
| 60/047,503 | 23-May-1997 | 60/126,501 | 26-Mar-1999 |
| 60/056,903 | 22-Aug-1997 | 60/171,551 | 22-Dec-1999 |
| 60/056,888 | 22-Aug-1997 | US00/07527 | 22-Mar-2000 |
| 60/040,626 | 07-Mar-1997 | 60/126,504 | 26-Mar-1999 |
| 60/056,882 | 22-Aug-1997 | US00/07661 | 23-Mar-2000 |
| 60/056,875 | 22-Aug-1997 | 60/174,847 | 07-Jan-2000 |
| 60/047,501 | 23-May-1997 | 60/174,853 | 07-Jan-2000 |
| 60/056,878 | 22-Aug-1997 | US00/07579 | 23-Mar-2000 |
| 60/056,662 | 22-Aug-1997 | 60/126,509 | 26-Mar-1999 |
| 60/056,872 | 22-Aug-1997 | 60/174,852 | 07-Jan-2000 |
| 60/047,589 | 23-May-1997 | 60/242,710 | 25-Oct-2000 |
| 60/056,884 | 22-Aug-1997 | 60/126,506 | 26-Mar-1999 |
| 60/056,862 | 22-Aug-1997 | US00/07723 | 23-Mar-2000 |
| 60/040,334 | 07-Mar-1997 | 60/174,850 | 07-Jan-2000 |
| 60/047,583 | 23-May-1997 | US00/07724 | 23-Mar-2000 |
| 60/047,618 | 23-May-1997 | 60/126,510 | 26-Mar-1999 |
| 60/047,594 | 23-May-1997 | 60/138,573 | 11-Jun-1999 |
| 60/047,617 | 23-May-1997 | US00/14929 | 01-Jun-2000 |
| 60/047,633 | 23-May-1997 | 60/174,851 | 07-Jan-2000 |
| 60/047,593 | 23-May-1997 | 60/126,508 | 26-Mar-1999 |
| 60/056,630 | 22-Aug-1997 | US00/07722 | 23-Mar-2000 |
| 60/047,502 | 23-May-1997 | 60/174,871 | 07-Jan-2000 |
| 60/040,336 | 07-Mar-1997 | US00/07578 | 23-Mar-2000 |
| 60/056,887 | 22-Aug-1997 | 60/174,872 | 07-Jan-2000 |
| 60/056,893 | 22-Aug-1997 | 60/126,507 | 26-Mar-1999 |
| 60/056,889 | 22-Aug-1997 | 60/174,877 | 07-Jan-2000 |
| 60/047,614 | 23-May-1997 | US00/07726 | 23-Mar-2000 |
| 60/047,615 | 23-May-1997 | 60/126,597 | 26-Mar-1999 |
| 60/040,163 | 07-Mar-1997 | 60/126,601 | 26-Mar-1999 |
| 60/047,597 | 23-May-1997 | US00/07677 | 23-Mar-2000 |
| 60/056,877 | 22-Aug-1997 | 60/176,064 | 14-Jan-2000 |
| 60/047,600 | 23-May-1997 | 60/154,373 | 17-Sep-1999 |
| 60/056,908 | 22-Aug-1997 | 60/176,063 | 14-Jan-2000 |
| 60/056,886 | 22-Aug-1997 | US00/07725 | 23-Mar-2000 |
| 60/040,710 | 14-Mar-1997 | 60/126,602 | 26-Mar-1999 |
| 60/050,934 | 30-May-1997 | 60/176,052 | 14-Jan-2000 |
| 60/048,100 | 30-May-1997 | US00/09070 | 06-Apr-2000 |
| 60/048,189 | 30-May-1997 | 60/128,695 | 09-Apr-1999 |
| 60/048,357 | 30-May-1997 | US00/08982 | 06-Apr-2000 |
| 60/040,762 | 14-Mar-1997 | 60/128,696 | 09-Apr-1999 |
| 60/041,277 | 21-Mar-1997 | 60/176,069 | 14-Jan-2000 |
| 60/048,135 | 30-May-1997 | 60/176,068 | 14-Jan-2000 |
| 60/048,350 | 30-May-1997 | US00/08983 | 06-Apr-2000 |
| 60/048,094 | 30-May-1997 | 60/128,703 | 09-Apr-1999 |
| 60/048,188 | 30-May-1997 | 60/176,929 | 20-Jan-2000 |
| 60/048,099 | 30-May-1997 | US00/09067 | 06-Apr-2000 |
| 60/050,937 | 30-May-1997 | 60/128,697 | 09-Apr-1999 |
| 60/042,344 | 21-Mar-1997 | US00/09066 | 06-Apr-2000 |
| 60/048,352 | 30-May-1997 | 60/176,926 | 20-Jan-2000 |
| 60/048,187 | 30-May-1997 | 60/128,698 | 09-Apr-1999 |
| 60/048,186 | 30-May-1997 | US00/09068 | 06-Apr-2000 |
| 60/048,095 | 30-May-1997 | 60/128,699 | 09-Apr-1999 |
| 60/048,131 | 30-May-1997 | 60/177,050 | 20-Jan-2000 |
| 60/048,069 | 30-May-1997 | 60/177,166 | 20-Jan-2000 |
| 60/041,276 | 21-Mar-1997 | US00/08981 | 06-Apr-2000 |
| 60/048,096 | 30-May-1997 | 60/128,701 | 09-Apr-1999 |
| 60/048,154 | 30-May-1997 | 60/128,700 | 09-Apr-1999 |
| 60/048,160 | 30-May-1997 | 60/176,930 | 20-Jan-2000 |
| 60/041,281 | 21-Mar-1997 | US00/08980 | 06-Apr-2000 |
| 60/048,355 | 30-May-1997 | 60/128,694 | 09-Apr-1999 |
| 60/048,351 | 30-May-1997 | US00/09071 | 06-Apr-2000 |
| 60/048,068 | 30-May-1997 | 60/176,931 | 20-Jan-2000 |
| 60/042,825 | 08-Apr-1997 | US00/09069 | 06-Apr-2000 |
| 60/048,184 | 30-May-1997 | 60/177,049 | 20-Jan-2000 |
| 60/042,727 | 08-Apr-1997 | 60/128,702 | 09-Apr-1999 |
| 60/048,070 | 30-May-1997 | 60/138,629 | 11-Jun-1999 |
| 60/042,728 | 08-Apr-1997 | US00/15136 | 01-Jun-2000 |
| 60/042,726 | 08-Apr-1997 | 60/138,628 | 11-Jun-1999 |
| 60/042,754 | 08-Apr-1997 | US00/14926 | 01-Jun-2000 |
| 60/048,190 | 30-May-1997 | 60/138,631 | 11-Jun-1999 |
| 60/044,039 | 30-May-1997 | US00/14963 | 01-Jun-2000 |
| 60/048,093 | 30-May-1997 | 60/138,632 | 11-Jun-1999 |
| 60/057,645 | 05-Sep-1997 | US00/15135 | 01-Jun-2000 |
| 60/049,375 | 06-Jun-1997 | US00/14934 | 01-Jun-2000 |
| 60/048,885 | 06-Jun-1997 | 60/138,599 | 11-Jun-1999 |
| 60/057,668 | 05-Sep-1997 | 60/138,572 | 11-Jun-1999 |
| 60/057,642 | 05-Sep-1997 | US00/14933 | 01-Jun-2000 |
| 60/057,635 | 05-Sep-1997 | US00/15137 | 01-Jun-2000 |
| 60/048,881 | 06-Jun-1997 | 60/138,625 | 11-Jun-1999 |
| 60/048,880 | 06-Jun-1997 | 60/138,633 | 11-Jun-1999 |
| 60/049,020 | 06-Jun-1997 | US00/14928 | 01-Jun-2000 |
| 60/057,667 | 05-Sep-1997 | 60/,138,630 | 11-Jun-1999 |
| 60/057,666 | 05-Sep-1997 | US00/14973 | 01-Jun-2000 |
| 60/048,876 | 06-Jun-1997 | US00/14964 | 01-Jun-2000 |
| 60/057,627 | 05-Sep-1997 | 60/138,627 | 11-Jun-1999 |
| 60/048,896 | 06-Jun-1997 | US00/26376 | 26-Sep-2000 |
| 60/057,764 | 05-Sep-1997 | 60/155,808 | 27-Sep-1999 |
| 60/048,895 | 06-Jun-1997 | US00/26371 | 26-Sep-2000 |
| 60/048,884 | 06-Jun-1997 | 60/155,804 | 27-Sep-1999 |
| 60/057,769 | 05-Sep-1997 | 60/155,807 | 27-Sep-1999 |
| 60/057,643 | 05-Sep-1997 | US00/26324 | 26-Sep-2000 |
| 60/048,894 | 06-Jun-1997 | US00/26323 | 26-Sep-2000 |
| 60/048,971 | 06-Jun-1997 | 60/155,805 | 27-Sep-1999 |
| 60/057,763 | 05-Sep-1997 | US00/26337 | 26-Sep-2000 |
| 60/057,584 | 05-Sep-1997 | 60/155,806 | 27-Sep-1999 |
| 60/048,964 | 06-Jun-1997 | 60/201,194 | 02-May-2000 |
| 60/048,893 | 06-Jun-1997 | 60/212,142 | 16-Jun-2000 |
| 60/057,661 | 05-Sep-1997 | US00/29363 | 25-Oct-2000 |
| 60/048,899 | 06-Jun-1997 | 60/215,139 | 30-Jun-2000 |
| 60/057,647 | 05-Sep-1997 | 60/162,239 | 29-Oct-1999 |
| 60/048,882 | 06-Jun-1997 | US00/29360 | 25-Oct-2000 |
| 60/057,650 | 05-Sep-1997 | 60/162,211 | 29-Oct-1999 |
| 60/048,892 | 06-Jun-1997 | 60/215,138 | 30-Jun-2000 |
| 60/048,901 | 06-Jun-1997 | 60/162,240 | 29-Oct-1999 |
| 60/048,900 | 06-Jun-1997 | US00/29362 | 25-Oct-2000 |
| 60/057,646 | 05-Sep-1997 | 60/215,131 | 30-Jun-2000 |
| 60/057,651 | 05-Sep-1997 | US00/29365 | 25-Oct-2000 |
| 60/057,662 | 05-Sep-1997 | 60/162,237 | 29-Oct-1999 |
| 60/048,915 | 06-Jun-1997 | 60/219,666 | 21-Jul-2000 |
| 60/057,654 | 05-Sep-1997 | 60/215,134 | 30-Jun-2000 |
| 60/048,916 | 06-Jun-1997 | US00/29364 | 25-Oct-2000 |
| 60/048,972 | 06-Jun-1997 | 60/162,238 | 29-Oct-1999 |
| 60/057,775 | 05-Sep-1997 | 60/163,580 | 05-Nov-1999 |
| 60/057,644 | 05-Sep-1997 | 60/215,130 | 30-Jun-2000 |
| 60/049,019 | 06-Jun-1997 | US00/30040 | 01-Nov-2000 |
| 60/057,765 | 05-Sep-1997 | US00/30037 | 01-Nov-2000 |
| 60/048,970 | 06-Jun-1997 | 60/163,577 | 05-Nov-1999 |
| 60/057,762 | 05-Sep-1997 | 60/215,137 | 30-Jun-2000 |
| 60/057,774 | 05-Sep-1997 | 60/215,133 | 30-Jun-2000 |
| 60/057,649 | 05-Sep-1997 | 60/163,581 | 05-Nov-1999 |
| 60/057,648 | 05-Sep-1997 | US00/30045 | 01-Nov-2000 |
| 60/049,374 | 06-Jun-1997 | 60/163,576 | 05-Nov-1999 |
| 60/048,875 | 06-Jun-1997 | US00/30036 | 01-Nov-2000 |
| 60/049,373 | 06-Jun-1997 | 60/221,366 | 27-Jul-2000 |
| 60/057,771 | 05-Sep-1997 | 60/221,367 | 27-Jul-2000 |
| 60/048,917 | 06-Jun-1997 | 60/195,296 | 07-Apr-2000 |
| 60/048,949 | 06-Jun-1997 | US00/30039 | 01-Nov-2000 |
| 60/057,770 | 05-Sep-1997 | 60/164,344 | 09-Nov-1999 |
| 60/048,897 | 06-Jun-1997 | 60/221,142 | 27-Jul-2000 |
| 60/057,761 | 05-Sep-1997 | US00/30654 | 08-Nov-2000 |
| 60/057,776 | 05-Sep-1997 | 60/164,835 | 12-Nov-1999 |
| 60/057,760 | 05-Sep-1997 | 60/164,744 | 12-Nov-1999 |
| 60/048,974 | 06-Jun-1997 | US00/30628 | 08-Nov-2000 |
| 60/048,883 | 06-Jun-1997 | 60/215,140 | 30-Jun-2000 |
| 60/048,898 | 06-Jun-1997 | US00/30653 | 08-Nov-2000 |
| 60/057,778 | 05-Sep-1997 | 60/164,735 | 12-Nov-1999 |
| 60/057,629 | 05-Sep-1997 | 60/221,193 | 27-Jul-2000 |
| 60/057,777 | 05-Sep-1997 | 60/222,904 | 03-Aug-2000 |
| 60/048,962 | 06-Jun-1997 | 60/164,825 | 12-Nov-1999 |
| 60/048,963 | 06-Jun-1997 | US00/30629 | 08-Nov-2000 |
| 60/048,878 | 06-Jun-1997 | 60/224,007 | 04-Aug-2000 |
| 60/048,877 | 06-Jun-1997 | US00/30679 | 08-Nov-2000 |
| 60/057,628 | 05-Sep-1997 | 60/164,834 | 12-Nov-1999 |
| 60/057,634 | 05-Sep-1997 | 60/164,750 | 12-Nov-1999 |
| 60/058,669 | 12-Sep-1997 | 60/215,128 | 30-Jun-2000 |
| 60/058,668 | 12-Sep-1997 | US00/30674 | 08-Nov-2000 |
| 60/058,750 | 12-Sep-1997 | 60/166,415 | 19-Nov-1999 |
| 60/049,566 | 13-Jun-1997 | US00/31162 | 15-Nov-2000 |
| 60/052,989 | 13-Jun-1997 | 60/215,136 | 30-Jun-2000 |
| 60/049,608 | 13-Jun-1997 | 60/166,414 | 19-Nov-1999 |
| 60/049,609 | 13-Jun-1997 | 60/219,665 | 21-Jul-2000 |
| 60/049,607 | 13-Jun-1997 | US00/31282 | 15-Nov-2000 |
| 60/058,665 | 12-Sep-1997 | 60/215,132 | 30-Jun-2000 |
| 60/058,971 | 12-Sep-1997 | 60/164,731 | 12-Nov-1999 |
| 60/058,972 | 12-Sep-1997 | US00/30657 | 08-Nov-2000 |
| 60/058,975 | 12-Sep-1997 | 60/256,968 | 21-Dec-2000 |
| 60/049,611 | 13-Jun-1997 | 60/226,280 | 18-Aug-2000 |
| 60/050,901 | 13-Jun-1997 | US01/01396 | 17-Jan-2001 |
| 60/056,250 | 29-Aug-1997 | 60/226,380 | 18-Aug-2000 |
| 60/056,296 | 29-Aug-1997 | US01/01387 | 17-Jan-2001 |
| 60/056,293 | 29-Aug-1997 | 60/259,803 | 05-Jan-2001 |
| 60/048,356 | 30-May-1997 | US01/01567 | 17-Jan-2001 |
| 60/048,101 | 30-May-1997 | 60/228,084 | 28-Aug-2000 |
| 60/050,935 | 30-May-1997 | US01/01431 | 17-Jan-2001 |
| 60/049,550 | 13-Jun-1997 | 60/231,968 | 12-Sep-2000 |
| 60/049,610 | 13-Jun-1997 | 60/234,211 | 20-Sep-2000 |
| 60/060,841 | 02-Oct-1997 | US01/00544 | 09-Jan-2001 |
| 60/060,834 | 02-Oct-1997 | 60/226,282 | 18-Aug-2000 |
| 60/061,060 | 02-Oct-1997 | US01/01435 | 17-Jan-2001 |
| 60/049,606 | 13-Jun-1997 | 60/232,104 | 12-Sep-2000 |
| 60/049,548 | 13-Jun-1997 | US01/01386 | 17-Jan-2001 |
| 60/049,549 | 13-Jun-1997 | 60/234,210 | 20-Sep-2000 |
| 60/060,865 | 02-Oct-1997 | US01/01565 | 17-Jan-2001 |
| 60/060,844 | 02-Oct-1997 | 60/259,805 | 05-Jan-2001 |
| 60/049,547 | 13-Jun-1997 | US01/01394 | 17-Jan-2001 |
| 60/061,059 | 02-Oct-1997 | 60/226,278 | 18-Aug-2000 |
| 60/051,480 | 01-Jul-1997 | 60/259,678 | 05-Jan-2001 |
| 60/051,381 | 01-Jul-1997 | 60/226,279 | 18-Aug-2000 |
| 60/058,663 | 12-Sep-1997 | US01/01434 | 17-Jan-2001 |
| 60/058,598 | 12-Sep-1997 | 60/226,281 | 18-Aug-2000 |
| 60/051,925 | 08-Jul-1997 | US01/01397 | 17-Jan-2001 |
| 60/052,793 | 08-Jul-1997 | 60/231,969 | 12-Sep-2000 |
| 60/058,664 | 12-Sep-1997 | US01/01385 | 17-Jan-2001 |
| 60/058,660 | 12-Sep-1997 | 60/228,086 | 28-Aug-2000 |
| 60/058,661 | 12-Sep-1997 | 60/259,516 | 04-Jan-2001 |
| 60/051,926 | 08-Jul-1997 | US01/01384 | 17-Jan-2001 |
| 60/051,929 | 08-Jul-1997 | 60/228,083 | 28-Aug-2000 |
| 60/058,785 | 12-Sep-1997 | 60/259,804 | 05-Jan-2001 |
| 60/055,722 | 18-Aug-1997 | US01/01383 | 17-Jan-2001 |
| 60/051,932 | 08-Jul-1997 | 60/064,988 | 07-Nov-1997 |
| 60/052,732 | 08-Jul-1997 | 60/064,912 | 07-Nov-1997 |
| 60/052,803 | 08-Jul-1997 | 60/064,900 | 07-Nov-1997 |
| 60/055,949 | 18-Aug-1997 | 60/064,983 | 07-Nov-1997 |
| 60/055,948 | 18-Aug-1997 | 60/064,911 | 07-Nov-1997 |
| 60/055,723 | 18-Aug-1997 | 60/064,985 | 07-Nov-1997 |
| 60/051,931 | 08-Jul-1997 | 60/064,908 | 07-Nov-1997 |
| 60/051,930 | 08-Jul-1997 | 60/064,984 | 07-Nov-1997 |
| 60/051,920 | 08-Jul-1997 | 60/064,987 | 07-Nov-1997 |
| 60/051,918 | 08-Jul-1997 | 60/066,100 | 17-Nov-1997 |
| 60/051,916 | 08-Jul-1997 | 60/066,095 | 17-Nov-1997 |
| 60/055,953 | 18-Aug-1997 | 60/066,089 | 17-Nov-1997 |
| 60/055,950 | 18-Aug-1997 | 60/066,090 | 17-Nov-1997 |
| 60/055,947 | 18-Aug-1997 | 60/066,094 | 17-Nov-1997 |
| 60/055,964 | 18-Aug-1997 | 60/068,007 | 18-Dec-1997 |
| 60/056,360 | 18-Aug-1997 | 60/068,006 | 18-Dec-1997 |
| 60/055,954 | 18-Aug-1997 | 60/068,008 | 18-Dec-1997 |
| 60/055,984 | 18-Aug-1997 | 60/068,057 | 18-Dec-1997 |
| 60/055,684 | 18-Aug-1997 | 60/070,923 | 18-Dec-1997 |
| 60/052,795 | 08-Jul-1997 | 60/068,053 | 18-Dec-1997 |
| 60/052,733 | 08-Jul-1997 | 60/068,054 | 18-Dec-1997 |
| 60/051,928 | 08-Jul-1997 | 60/068,064 | 18-Dec-1997 |
| 60/051,919 | 08-Jul-1997 | 60/068,369 | 19-Dec-1997 |
| 60/055,952 | 18-Aug-1997 | 60/068,367 | 19-Dec-1997 |
| 60/055,985 | 18-Aug-1997 | 60/068,169 | 19-Dec-1997 |
| 60/056,359 | 18-Aug-1997 | 60/068,365 | 19-Dec-1997 |
| 60/055,725 | 18-Aug-1997 | 60/070,704 | 07-Jan-1998 |
| 60/052,661 | 16-Jul-1997 | 60/070,657 | 07-Jan-1998 |
| 60/052,870 | 16-Jul-1997 | 60/070,658 | 07-Jan-1998 |
| 60/052,871 | 16-Jul-1997 | 60/070,692 | 07-Jan-1998 |
| 60/052,872 | 16-Jul-1997 | 60/073,160 | 30-Jan-1998 |
| 60/052,875 | 16-Jul-1997 | 60/073,159 | 30-Jan-1998 |
| 60/052,873 | 16-Jul-1997 | 60/073,165 | 30-Jan-1998 |
| 60/052,874 | 16-Jul-1997 | 60/073,164 | 30-Jan-1998 |
| 60/055,724 | 18-Aug-1997 | 60/073,167 | 30-Jan-1998 |
| 60/055,726 | 18-Aug-1997 | 60/073,162 | 30-Jan-1998 |
| 60/056,361 | 18-Aug-1997 | 60/073,161 | 30-Jan-1998 |
| 60/055,946 | 18-Aug-1997 | 60/073,170 | 30-Jan-1998 |
| 60/053,441 | 22-Jul-1997 | 60/074,341 | 09-Feb-1998 |
| 60/053,440 | 22-Jul-1997 | 60/074,141 | 09-Feb-1998 |
| 60/055,683 | 18-Aug-1997 | 60/077,714 | 12-Mar-1998 |
| 60/055,989 | 18-Aug-1997 | 60/077,687 | 12-Mar-1998 |
| 60/053,442 | 22-Jul-1997 | 60/077,696 | 12-Mar-1998 |
| 60/054,209 | 30-Jul-1997 | 60/077,686 | 12-Mar-1998 |
| 60/055,968 | 18-Aug-1997 | 60/078,574 | 19-Mar-1998 |
| 60/055,972 | 18-Aug-1997 | 60/078,566 | 19-Mar-1998 |
| 60/055,969 | 18-Aug-1997 | 60/078,576 | 19-Mar-1998 |
| 60/054,212 | 30-Jul-1997 | 60/078,577 | 19-Mar-1998 |
| 60/054,234 | 30-Jul-1997 | 60/078,581 | 19-Mar-1998 |
| 60/055,986 | 18-Aug-1997 | 60/078,573 | 19-Mar-1998 |
| 60/055,386 | 05-Aug-1997 | 60/078,578 | 19-Mar-1998 |
| 60/055,970 | 18-Aug-1997 | 60/078,563 | 19-Mar-1998 |
| 60/054,807 | 05-Aug-1997 | 60/080,313 | 01-Apr-1998 |
| 60/056,561 | 19-Aug-1997 | 60/080,312 | 01-Apr-1998 |
| 60/054,214 | 30-Jul-1997 | 60/080,314 | 01-Apr-1998 |
| 60/054,218 | 30-Jul-1997 | 60/085,105 | 12-May-1998 |
| 60/054,236 | 30-Jul-1997 | 60/085,180 | 12-May-1998 |
| 60/054,215 | 30-Jul-1997 | 60/085,093 | 12-May-1998 |
| 60/056,543 | 19-Aug-1997 | 60/085,094 | 12-May-1998 |
| 60/056,729 | 19-Aug-1997 | 60/085,928 | 18-May-1998 |
| 60/056,534 | 19-Aug-1997 | 60/085,920 | 18-May-1998 |
| 60/054,217 | 30-Jul-1997 | 60/085,906 | 18-May-1998 |
| 60/054,213 | 30-Jul-1997 | 60/085,927 | 18-May-1998 |
| 60/056,730 | 19-Aug-1997 | 60/085,924 | 18-May-1998 |
| 60/056,727 | 19-Aug-1997 | 60/085,925 | 18-May-1998 |
| 60/054,211 | 30-Jul-1997 | 60/085,921 | 18-May-1998 |
| 60/056,554 | 19-Aug-1997 | 60/085,922 | 18-May-1998 |
| 60/055,309 | 05-Aug-1997 | 60/085,923 | 18-May-1998 |
| 60/056,563 | 19-Aug-1997 | 60/090,112 | 22-Jun-1998 |
| 60/054,798 | 05-Aug-1997 | 60/089,507 | 16-Jun-1998 |
| 60/056,557 | 19-Aug-1997 | 60/089,508 | 16-Jun-1998 |
| 60/055,312 | 05-Aug-1997 | 60/089,510 | 16-Jun-1998 |
| 60/056,371 | 19-Aug-1997 | 60/089,509 | 16-Jun-1998 |
| 60/056,732 | 19-Aug-1997 | 60/090,113 | 22-Jun-1998 |
| 60/055,310 | 05-Aug-1997 | 60/092,956 | 15-Jul-1998 |
| 60/056,556 | 19-Aug-1997 | 60/092,921 | 15-Jul-1998 |
| 60/056,535 | 19-Aug-1997 | 60/092,922 | 15-Jul-1998 |
| 60/056,369 | 19-Aug-1997 | 60/094,657 | 30-Jul-1998 |
| 60/056,555 | 19-Aug-1997 | 60/095,486 | 05-Aug-1998 |
| 60/056,370 | 19-Aug-1997 | 60/096,319 | 12-Aug-1998 |
| 60/054,804 | 05-Aug-1997 | 60/095,455 | 06-Aug-1998 |
| 60/056,731 | 19-Aug-1997 | 60/095,454 | 06-Aug-1998 |
| 60/056,366 | 19-Aug-1997 | 60/097,917 | 25-Aug-1998 |
| 60/054,809 | 05-Aug-1997 | 60/098,634 | 31-Aug-1998 |
| 60/054,806 | 05-Aug-1997 | 60/101,546 | 23-Sep-1998 |
| 60/054,803 | 05-Aug-1997 | 60/102,895 | 02-Oct-1998 |
| 60/056,364 | 19-Aug-1997 | 60/108,207 | 12-Nov-1998 |
| 60/055,311 | 05-Aug-1997 | 60/236,326 | 29-Sep-2000 |
| 60/056,367 | 19-Aug-1997 | US01/01432 | 17-Jan-2001 |
| 60/056,365 | 19-Aug-1997 | US98/04482 | 06-Mar-1998 |
| 60/054,808 | 05-Aug-1997 | 09/148,545 | 04-Sep-1998 |
| 60/056,368 | 19-Aug-1997 | 09/149,476 | 08-Sep-1998 |
| 60/056,726 | 19-Aug-1997 | US98/04493 | 06-Mar-1998 |
| 60/056,728 | 19-Aug-1997 | 60/190,068 | 17-Mar-2000 |
| 60/056,628 | 19-Aug-1997 | US98/04858 | 12-Mar-1998 |
| 60/056,629 | 19-Aug-1997 | 09/152,060 | 11-Sep-1998 |
| 60/056,271 | 29-Aug-1997 | 60/265,583 | 02-Feb-2001 |
| 60/056,247 | 29-Aug-1997 | 09/154,707 | 17-Sep-1998 |
| 60/056,073 | 29-Aug-1997 | US98/05311 | 19-Mar-1998 |
| 60/056,270 | 29-Aug-1997 | US98/06801 | 07-Apr-1998 |
| 60/057,626 | 05-Sep-1997 | 09/166,780 | 06-Oct-1998 |
| 60/057,663 | 05-Sep-1997 | 09/189,144 | 10-Nov-1998 |
| 60/057,669 | 05-Sep-1997 | US98/10868 | 28-May-1998 |
| 60/058,974 | 12-Sep-1997 | 60/184,836 | 24-Feb-2000 |
| 60/058,973 | 12-Sep-1997 | 60/193,170 | 29-Mar-2000 |
| 60/058,667 | 12-Sep-1997 | US98/11422 | 04-Jun-1998 |
| 60/058,666 | 12-Sep-1997 | 09/205,258 | 04-Dec-1998 |
| 60/060,837 | 02-Oct-1997 | US98/12125 | 11-Jun-1998 |
| 60/060,862 | 02-Oct-1997 | 09/209,462 | 11-Dec-1998 |
| 60/060,839 | 02-Oct-1997 | 09/213,365 | 17-Dec-1998 |
| 60/060,866 | 02-Oct-1997 | US98/13608 | 30-Jun-1998 |
| 60/060,843 | 02-Oct-1997 | 60/239,899 | 13-Oct-2000 |
| 60/060,836 | 02-Oct-1997 | US98/13684 | 07-Jul-1998 |
| 60/060,874 | 02-Oct-1997 | 60/180,909 | 08-Feb-2000 |
| 60/060,838 | 02-Oct-1997 | US98/14613 | 15-Jul-1998 |
| 60/060,884 | 02-Oct-1997 | 09/229,982 | 14-Jan-1999 |
| 60/060,833 | 02-Oct-1997 | US98/15949 | 29-Jul-1998 |
| 60/060,880 | 02-Oct-1997 | 09/236,557 | 26-Jan-1999 |
| 60/061,529 | 09-Oct-1997 | 09/666,984 | 21-Sep-2000 |
| 60/071,498 | 09-Oct-1997 | 2,298,852 | 29-Jul-1998 |
| 60/061,463 | 09-Oct-1997 | 60/238,291 | 06-Oct-2000 |
| 60/061,536 | 09-Oct-1997 | US98/16235 | 04-Aug-1998 |
| 60/061,527 | 09-Oct-1997 | 09/244,112 | 04-Feb-1999 |
| 60/061,532 | 09-Oct-1997 | 09/251,329 | 17-Feb-1999 |
| 60/063,100 | 24-Oct-1997 | US98/17044 | 18-Aug-1998 |
| 60/062,784 | 24-Oct-1997 | 09/716,128 | 17-Nov-2000 |
| 60/063,148 | 24-Oct-1997 | 09/729,835 | 06-Dec-2000 |
| 60/063,387 | 24-Oct-1997 | US98/17709 | 27-Aug-1998 |
| 60/063,386 | 24-Oct-1997 | 09/257,179 | 25-Feb-1999 |
| 60/063,089 | 24-Oct-1997 | US98/18360 | 03-Sep-1998 |
| 60/063,091 | 24-Oct-1997 | 60/262,066 | 18-Jan-2001 |
| 60/063,090 | 24-Oct-1997 | 09/722,329 | 28-Nov-2000 |
| 60/063,092 | 24-Oct-1997 | 09/262,109 | 04-Mar-1999 |
| 60/063,111 | 24-Oct-1997 | US98/20775 | 01-Oct-1998 |
| 60/063,109 | 24-Oct-1997 | 09/281,976 | 31-Mar-1999 |
| 60/063,110 | 24-Oct-1997 | 09/288,143 | 08-Apr-1999 |
| 60/063,101 | 24-Oct-1997 | 60/244,591 | 01-Nov-2000 |
| 60/063,098 | 24-Oct-1997 | US98/21142 | 08-Oct-1998 |
| 60/063,097 | 24-Oct-1997 | US98/22376 | 23-Oct-1998 |
| 60/074,037 | 09-Feb-1998 | 09/296,622 | 23-Apr-1999 |
| 60/074,157 | 09-Feb-1998 | 60/239,893 | 13-Oct-2000 |
| 60/074,118 | 09-Feb-1998 | 09/305,736 | 05-May-1999 |
| 60/076,053 | 26-Feb-1998 | US98/23435 | 04-Nov-1998 |
| 60/076,057 | 26-Feb-1998 | US98/27059 | 17-Dec-1998 |
| 60/076,054 | 26-Feb-1998 | 09/334,595 | 17-Jun-1999 |
| 60/076,052 | 26-Feb-1998 | 09/348,457 | 07-Jul-1999 |
| 60/076,051 | 26-Feb-1998 | 09/739,907 | 20-Dec-2000 |
| 60/113,006 | 18-Dec-1998 | US99/00108 | 06-Jan-1999 |
| 60/112,809 | 17-Dec-1998 | 60/232,150 | 12-Sep-2000 |
| 60/116,330 | 19-Jan-1999 | 09/363,044 | 29-Jul-1999 |
| 60/119,468 | 10-Feb-1999 | US99/01621 | 27-Jan-1999 |
| 60/125,055 | 18-Mar-1999 | US99/02293 | 04-Feb-1999 |
| 60/128,693 | 09-Apr-1999 | 09/369,247 | 05-Aug-1999 |
| 60/130,991 | 26-Apr-1999 | 09/716,129 | 17-Nov-2000 |
| 60/137,725 | 07-Jun-1999 | US99/03939 | 24-Feb-1999 |
| 60/145,220 | 23-Jul-1999 | US99/05721 | 11-Mar-1999 |
| 60/149,182 | 17-Aug-1999 | 09/393,022 | 09-Sep-1999 |
| 60/152,317 | 03-Sep-1999 | 09/397,945 | 17-Sep-1999 |
| 60/152,315 | 03-Sep-1999 | 60/231,846 | 11-Sep-2000 |
| 60/155,709 | 24-Sep-1999 | US99/09847 | 06-May-1999 |
| 60/163,085 | 02-Nov-1999 | 09/437,658 | 10-Nov-1999 |
| 60/172,411 | 17-Dec-1999 | US99/13418 | 15-Jun-1999 |
| 60/134,068 | 13-May-1999 | 60/263,681 | 24-Jan-2001 |
| US00/12788 | 11-May-2000 | 60/263,230 | 23-Jan-2001 |
| 60/167,061 | 23-Nov-1999 | 09/461,325 | 14-Dec-1999 |
| 60/124,146 | 12-Mar-1999 | US99/15849 | 14-Jul-1999 |
| US00/06043 | 09-Mar-2000 | 60/234,925 | 25-Sep-2000 |
| 60/124,093 | 12-Mar-1999 | US01/00911 | 12-Jan-2001 |
| US00/06012 | 09-Mar-2000 | 09/482,273 | 13-Jan-2000 |
| 160/166,989 | 23-Nov-1999 | 09/489,847 | 24-Jan-2000 |
| US00/06058 | 09-Mar-2000 | US99/17130 | 29-Jul-1999 |
| 60/124,145 | 12-Mar-1999 | US99/19330 | 24-Aug-1999 |
| 60/168,654 | 03-Dec-1999 | 09/511,554 | 23-Feb-2000 |
| 60/124,099 | 12-Mar-1999 | 09/531,119 | 20-Mar-2000 |
| US00/06044 | 09-Mar-2000 | US99/22012 | 22-Sep-1999 |
| 60/168,661 | 03-Dec-1999 | US99/26409 | 09-Nov-1999 |
| 60/124,096 | 12-Mar-1999 | 09/565,391 | 05-May-2000 |
| 60/168,622 | 03-Dec-1999 | US99/29950 | 16-Dec-1999 |
| US00/06059 | 09-Mar-2000 | 09/591,316 | 09-Jun-2000 |
| US00/06042 | 09-Mar-2000 | 09/618,150 | 17-Jul-2000 |
| 60/124,143 | 12-Mar-1999 | US00/00903 | 18-Jan-2000 |
| 60/168,663 | 03-Dec-1999 | 09/628,508 | 28-Jul-2000 |
| 60/124,095 | 12-Mar-1999 | US00/03062 | 08-Feb-2000 |
| US00/06014 | 09-Mar-2000 | US00/06783 | 16-Mar-2000 |
| 60/138,598 | 11-Jun-1999 | 09/661,453 | 13-Sep-2000 |
| 60/168,665 | 03-Dec-1999 | 09/684,524 | 10-Oct-2006 |
| US00/06013 | 09-Mar-2000 | US00/08979 | 06-Apr-2000 |
| 60/138,626 | 11-Jun-1999 | 09/726,643 | 01-Dec-2000 |
| 60/168,662 | 03-Dec-1999 | US00/15187 | 02-Jun-2000 |
| 60/125,360 | 19-Mar-1999 | 09/756,168 | 09-Jan-2001 |
| US00/06049 | 09-Mar-2000 | US00/19735 | 20-Jul-2000 |
| 60/168,667 | 03-Dec-1999 | US00/22325 | 16-Aug-2000 |
| 60/138,574 | 11-Jun-1999 | US00/24008 | 31-Aug-2000 |
| 60/124,144 | 12-Mar-1999 | US00/26013 | 22-Sep-2000 |
| 60/124,142 | 12-Mar-1999 | US00/28664 | 17-Oct-2000 |
| 60/138,597 | 11-Jun-1999 | 60/277340 | 21-Mar-01 |
| 60/168,666 | 03-Dec-1999 | 09/781,417 | 13-Feb-01 |
| US00/06057 | 09-Mar-2000 | 09/789,561 | 22-Feb-01 |
| 60/125,359 | 19-Mar-1999 | 09/800,729 | 08-Mar-01 |
| 60/168,664 | 03-Dec-1999 | 09/756,168 | 09-Jan-01 |

[1294] Furthermore, the contents and sequence listings of application Ser. No. 09/833,245, filed Apr. 12, 2001; Ser. No. 09/091,873 filed Jun. 25, 1998; 60/229,358 filed on Apr. 12, 2000; 60/199,384 filed on Apr. 25, 2000 and 60/256,931 filed on Dec. 21, 2000 are hereby incorporation by reference in their entirety.

The application's sequence listing, which the Patent Office published only in electronic form, follows.

SEQUENCE LISTING (2279 sequences)

SEQ ID NO: 1 - DNA, 23 bp, Artificial Sequence
  primer_bind: primer useful to clone human growth hormone cDNA
cccaagaattcccttatccaggc

SEQ ID NO: 2 - DNA, 33 bp, Artificial Sequence
  primer_bind: primer useful to clone human growth hormone cDNA
gggaagcttagaagccacaggatccctccacag

SEQ ID NO: 3 - DNA, 16 bp, Artificial Sequence
  misc_structure: synthetic oligonucleotide used to join DNA fragments with non-cohesive ends.
gataaagattcccaac

SEQ ID NO: 4 - DNA, 17 bp, Artificial Sequence
  misc_structure: synthetic oligonucleotide used to join DNA fragments with non-cohesive ends.
aattgttgggaatcttt

SEQ ID NO: 5 - DNA, 17 bp, Artificial Sequence
  misc_structure: synthetic oligonucleotide used to join DNA fragments with non-cohesive ends.
ttaggcttattcccaac

SEQ ID NO: 6 - DNA, 18 bp, Artificial Sequence
  misc_structure: synthetic oligonucleotide used to join DNA fragments with non-cohesive ends.
aattgttgggaataagcc

SEQ ID NO: 7 - protein, 24 aa, Artificial Sequence
  SITE 1)..(19): invertase leader sequence
  SITE 20)..(24): first 5 amino acids of mature human serum albumin
MLLQAFLFLLAGFAAKISADAHKS

SEQ ID NO: 8 - DNA, 21 bp, Artificial Sequence
  misc_structure: synthetic oligonucleotide used to join DNA fragments with non-cohesive ends.
gagatgcacacctgagtgagg

SEQ ID NO: 9 - DNA, 27 bp, Artificial Sequence
  misc_structure: synthetic oligonucleotide used to join DNA fragments with non-cohesive ends.
gatcctgtggcttcgatgcacacaaga

SEQ ID NO: 10 - DNA, 24 bp, Artificial Sequence
  misc_structure: synthetic oligonucleotide used to join DNA fragments with non-cohesive ends.
ctcttgtgtgcatcgaagccacag

SEQ ID NO: 11 - DNA, 30 bp, Artificial Sequence
  misc_structure: synthetic oligonucleotide used to join DNA fragments with non-cohesive ends.
tgtggaagagcctcagaatttattcccaac

SEQ ID NO: 12 - DNA, 31 bp, Artificial Sequence
  misc_structure: synthetic oligonucleotide used to join DNA fragments with non-cohesive ends.
aattgttgggaataaattctgaggctcttcc

SEQ ID NO: 13 - DNA, 47 bp, Artificial Sequence
  misc_structure: synthetic oligonucleotide used to join DNA fragments with non-cohesive ends.
ttaggcttaggtggcggtggatccggcggtggtggatctttcccaac

SEQ ID NO: 14 - DNA, 48 bp, Artificial Sequence
  misc_structure: synthetic oligonucleotide used to join DNA fragments with non-cohesive ends.
aattgttgggaaagatccaccaccgccggatccaccgccacctaagcc

SEQ ID NO: 15 - DNA, 62 bp, Artificial Sequence
  misc_structure: synthetic oligonucleotide used to join DNA fragments with non-cohesive ends.
ttaggcttaggcggtggtggatctggtggcggcggatctggtggcggtggatccttcccaac

SEQ ID NO: 16 - DNA, 63 bp, Artificial Sequence
  misc_structure: synthetic oligonucleotide used to join DNA fragments with non-cohesive ends.
aattgttgggaaggatccaccgccaccagatccgccgccaccagatccaccaccgcctaagcc

SEQ ID NO: 17 - DNA, 1782 bp, Homo sapiens
  CDS (1)..(1755)
gatgcacacaagagtgaggttgctcatcggtttaaagatttgggagaagaaaatttcaaagccttggtgttgattgcctttgctcagtatcttcagcagtgtccatttgaagatcatgtaaaattagtgaatgaagtaactgaatttgcaaaaacatgtgttgctgatgagtcagctgaaaattgtgacaaatcacttcataccctttttggagacaaattatgcacagttgcaactcttcgtgaaacctatggtgaaatggctgactgctgtgcaaaacaagaacctgagagaaatgaatgcttcttgcaacacaaagatgacaacccaaacctcccccgattggtgagaccagaggttgatgtgatgtgcactgcttttcatgacaatgaagagacatttttgaaaaaatacttatatgaaattgccagaagacatccttacttttatgccccggaactccttttctttgctaaaaggtataaagctgcttttacagaatgttgccaagctgctgataaagctgcctgcctgttgccaaagctcgatgaacttcgggatgaagggaaggcttcgtctgccaaacagagactcaaatgtgccagtctccaaaaatttggagaaagagctttcaaagcatgggcagtggctcgcctgagccagagatttcccaaagctgagtttgcagaagtttccaagttagtgacagatcttaccaaagtccacacggaatgctgccatggagatctgcttgaatgtgctgatgacagggcggaccttgccaagtatatctgtgaaaatcaggattcgatctccagtaaactgaaggaatgctgtgaaaaacctctgttggaaaaatcccactgcattgccgaagtggaaaatgatgagatgcctgctgacttgccttcattagctgctgattttgttgaaagtaaggatgtttgcaaaaactatgctgaggcaaaggatgtcttcctgggcatgtttttgtatgaatatgcaagaaggcatcctgattactctgtcgtgctgctgctgagacttgccaagacatatgaaaccactctagagaagtgctgtgccgctgcagatcctcatgaatgctatgccaaagtgttcgatgaatttaaacctcttgtggaagagcctcagaatttaatcaaacaaaactgtgagctttttgagcagcttggagagtacaaattccagaatgcgctattagttcgttacaccaagaaagtaccccaagtgtcaactccaactcttgtagaggtctcaagaaacctaggaaaagtgggcagcaaatgttgtaaacatcctgaagcaaaaagaatgccctgtgcagaagactatctatccgtggtcctgaaccagttatgtgtgttgcatgagaaaacgccagtaagtgacagagtcacaaaatgctgcacagagtccttggtgaacaggcgaccatgcttttcagctctggaagtcgatgaaacatacgttcccaaagagtttaatgctgaaacattcaccttccatgcagatatatgcacactttctgagaaggagagacaaatcaagaaacaaactgcacttgttgagcttgtgaaacacaagcccaaggcaacaaaagagcaactgaaagctgttatggatgatttcgcagcttttgtagagaagtgctgcaaggctgacgataaggagacctgctttgccgaggagggtaaaaaacttgttgctgcaagtcaagctgccttaggcttataacatctacatttaaaagcatctcag

SEQ ID NO: 18 - protein, 585 aa, Homo Sapiens [sequence omitted]

SEQ ID NO: 19 - DNA, 58 bp, Artificial Sequence
  primer_bind: primer used to generate XhoI and ClaI site in pPPC0006
gcctcgagaaaagagatgcacacaagagtgaggttgctcatcgatttaaagatttggg

SEQ ID NO: 20 - DNA, 59 bp, Artificial Sequence
  primer_bind: primer used in generation XhoI and ClaI site in pPPC0006
aatcgatgagcaacctcactcttgtgtgcatctcttttctcgaggctcctggaataagc

SEQ ID NO: 21 - DNA, 24 bp, Artificial Sequence
  primer_bind: primer used in generation XhoI and ClaI site in pPPC0006
tacaaacttaagagtccaattagc

SEQ ID NO: 22 - DNA, 29 bp, Artificial Sequence
  primer_bind: primer used in generation XhoI and ClaI site in pPPC0006
cacttctctagagtggtttcatatgtctt

SEQ ID NO: 23 - DNA, 60 bp, Artificial Sequence
  Misc_Structure: Synthetic oligonucleotide used to alter restriction sites in pPPC0007
aagctgccttaggcttataataaggcgcgccggccggccgtttaaactaagcttaattct

SEQ ID NO: 24 - DNA, 60 bp, Artificial Sequence
  Misc_Structure: Synthetic oligonucleotide used to alter restriction sites in pPPC0007
agaattaagcttagtttaaacggccggccggcgcgccttattataagcctaaggcagctt

SEQ ID NO: 25 - DNA, 32 bp, Artificial Sequence
  primer_bind: forward primer useful for generation of albumin fusion protein in which the albumin moiety is N-terminal of the Therapeutic Protein
  Misc_Structure (18): n equals a, t, g, or c
  Misc_Structure (19): n equals a, t, g, or c
  Misc_Structure (20): n equals a, t, g, or c
  Misc_Structure (21): n equals a, t, g, or c
  Misc_Structure (22): n equals a, t, g, or c
  Misc_Structure (23): n equals a, t, g, or c
  Misc_Structure (24): n equals a, t, g, or c
  Misc_Structure (25): n equals a, t, g, or c
  Misc_Structure (26): n equals a, t, g, or c
  Misc_Structure (27): n equals a, t, g, or c
  Misc_Structure (28): n equals a, t, g, or c
  Misc_Structure (29): n equals a, t, g, or c
  Misc_Structure (30): n equals a, t, g, or c
  Misc_Structure (31): n equals a, t, g, or c
  Misc_Structure (32): n equals a, t, g, or c
aagctgccttaggcttannnnnnnnnnnnnnn

SEQ ID NO: 26 - DNA, 51 bp, Artificial Sequence
  primer_bind: reverse primer useful for generation of albumin fusion protein in which the albumin moiety is N-terminal of the Therapeutic Protein
  Misc_Structure (37): n equals a, t, g, or c
  Misc_Structure (38): n equals a, t, g, or c
  Misc_Structure (39): n equals a, t, g, or c
  Misc_Structure (40): n equals a, t, g, or c
  Misc_Structure (41): n equals a, t, g, or c
  Misc_Structure (42): n equals a, t, g, or c
  Misc_Structure (43): n equals a, t, g, or c
  Misc_Structure (44): n equals a, t, g, or c
  Misc_Structure (45): n equals a, t, g, or c
  Misc_Structure (46): n equals a, t, g, or c
  Misc_Structure (47): n equals a, t, g, or c
  Misc_Structure (48): n equals a, t, g, or c
  Misc_Structure (49): n equals a, t, g, or c
  Misc_Structure (50): n equals a, t, g, or c
  Misc_Structure (51): n equals a, t, g, or c
gcgcgcgtttaaacggccggccggcgcgccttattannnnnnnnnnnnnnn

SEQ ID NO: 27 - DNA, 33 bp, Artificial Sequence
  forward primer useful for generation of albumin fusion protein in which the albumin moiety is c-terminal of the Therapeutic Protein
  Misc_Structure (19): n equals a, t, g, or c
  Misc_Structure (20): n equals a, t, g, or c
  Misc_Structure (21): n equals a, t, g, or c
  Misc_Structure (22): n equals a, t, g, or c
  Misc_Structure (23): n equals a, t, g, or c
  Misc_Structure (24): n equals a, t, g, or c
  Misc_Structure (25): n equals a, t, g, or c
  Misc_Structure (26): n equals a, t, g, or c
  Misc_Structure (27): n equals a, t, g, or c
  Misc_Structure (28): n equals a, t, g, or c
  Misc_Structure (29): n equals a, t, g, or c
  Misc_Structure (30): n equals a, t, g, or c
  Misc_Structure (31): n equals a, t, g, or c
  Misc_Structure (32): n equals a, t, g, or c
  Misc_Structure (33): n equals a, t, g, or c
aggagcgtcgacaaaagannnnnnnnnnnnnnn

SEQ ID NO: 28 - DNA, 52 bp, Artificial Sequence
  primer_bind: reverse primer useful for generation of albumin fusion protein in which the albumin moiety is c-terminal of the Therapeutic Protein
  Misc_Structure (38): n equals a, t, g, or c
  Misc_Structure (39): n equals a, t, g, or c
  Misc_Structure (40): n equals a, t, g, or c
  Misc_Structure (41): n equals a, t, g, or c
  Misc_Structure (42): n equals a, t, g, or c
  Misc_Structure (43): n equals a, t, g, or c
  Misc_Structure (44): n equals a, t, g, or c
  Misc_Structure (45): n equals a, t, g, or c
  Misc_Structure (46): n equals a, t, g, or c
  Misc_Structure (47): n equals a, t, g, or c
  Misc_Structure (48): n equals a, t, g, or c
  Misc_Structure (49): n equals a, t, g, or c
  Misc_Structure (50): n equals a, t, g, or c
  Misc_Structure (51): n equals a, t, g, or c
  Misc_Structure (52): n equals a, t, g, or c
ctttaaatcgatgagcaacctcactcttgtgtgcatcnnnnnnnnnnnnnnn

SEQ ID NO: 29 - protein, 24 aa, Artificial Sequence
  signal: signal peptide of natural human serum albumin protein
MKWVSFISLLFLFSSAYSRSLDKR

SEQ ID NO: 30 - DNA, 114 bp, Artificial Sequence
  primer_bind: forward primer useful for generation of PC4:HSA albumin fusion VECTOR
  misc_feature (5)..(10): BamHI retsriction site
  misc_feature (11)..(16): Hind III retsriction site
  misc_feature (17)..(27): Kozak sequence
  misc_feature (25)..(97): cds natural signal sequence of human serum albumin
  misc_feature (75)..(81): XhoI restriction site
  misc_feature (98)..(114): cds first six amino acids of human serum albumin
tcagggatccaagcttccgccaccatgaagtgggtaacctttatttcccttctttttctctttagctcggcttactcgaggggtgtgtttcgtcgagatgcacacaagagtgag

SEQ ID NO: 31 - DNA, 43 bp, Artificial Sequence
  primer_bind: reverse primer useful for generation of PC4:HSA albumin fusion VECTOR
  misc_feature (6)..(11): Asp718 restriction site
  misc_feature (12)..(17): EcoRI restriction site
  misc_feature (15)..(17): reverse complement of stop codon
  misc_feature (18)..(25): AscI restriction site
  misc_feature (18)..(43): reverse complement of DNA sequence encoding last 9 amino acids
gcagcggtaccgaattcggcgcgccttataagcctaaggcagc

SEQ ID NO: 32 - DNA, 46 bp, Artificial Sequence
  primer_bind: forward primer useful for inserting Therapeutic protein into pC4:HSA vector
  Misc_Structure (29): n equals a, t, g, or c
  Misc_Structure (30): n equals a, t, g, or c
  Misc_Structure (31): n equals a, t, g, or c
  Misc_Structure (32): n equals a, t, g, or c
  Misc_Structure (33): n equals a, t, g, or c
  Misc_Structure (34): n equals a, t, g, or c
  Misc_Structure (35): n equals a, t, g, or c
  Misc_Structure (36): n equals a, t, g, or c
  Misc_Structure (37): n equals a, t, g, or c
  Misc_Structure (38): n equals a, t, g, or c
  Misc_Structure (39): n equals a, t, g, or c
  Misc_Structure (40): n equals a, t, g, or c
  Misc_Structure (41): n equals a, t, g, or c
  Misc_Structure (42): n equals a, t, g, or c
  Misc_Structure (43): n equals a, t, g, or c
  Misc_Structure (44): n equals a, t, g, or c
  Misc_Structure (45): n equals a, t, g, or c
  Misc_Structure (46): n equals a, t, g, or c
ccgccgctcgaggggtgtgtttcgtcgannnnnnnnnnnnnnnnnn

SEQ ID NO: 33 - DNA, 55 bp, Artificial Sequence
  primer_bind: reverse primer useful for inserting Therapeutic protein into pC4:HSA vector
  Misc_Structure (38): n equals a, t, g, or c
  Misc_Structure (39): n equals a, t, g, or c
  Misc_Structure (40): n equals a, t, g, or c
  Misc_Structure (41): n equals a, t, g, or c
  Misc_Structure (42): n equals a, t, g, or c
  Misc_Structure (43): n equals a, t, g, or c
  Misc_Structure (44): n equals a, t, g, or c
  Misc_Structure (45): n equals a, t, g, or c
  Misc_Structure (46): n equals a, t, g, or c
  Misc_Structure (47): n equals a, t, g, or c
  Misc_Structure (48): n equals a, t, g, or c
  Misc_Structure (49): n equals a, t, g, or c
  Misc_Structure (50): n equals a, t, g, or c
  Misc_Structure (51): n equals a, t, g, or c
  Misc_Structure (52): n equals a, t, g, or c
  Misc_Structure (53): n equals a, t, g, or c
  Misc_Structure (54): n equals a, t, g, or c
  Misc_Structure (55): n equals a, t, g, or c
agtcccatcgatgagcaacctcactcttgtgtgcatcnnnnnnnnnnnnnnnnnn

SEQ ID NO: 34 - protein, 17 aa, Artificial Sequence
  signal: Stanniocalcin signal peptide
MLQNSAVLLLLVISASA

SEQ ID NO: 35 - protein, 22 aa, Artificial Sequence
  signal: Synthetic signal peptide
MPTWAWWLFLVLLLALWAPARG

SEQ ID NO: 36 - DNA, 23 bp, Artificial Sequence
  primer_bind: Degenerate VH forward primer useful for amplifying human VH domains
caggtgcagctggtgcagtctgg

SEQ ID NO: 37 - DNA, 23 bp, Artificial Sequence
  primer_bind: Degenerate VH forward primer useful for amplifying human VH domains
caggtcaacttaagggagtctgg

SEQ ID NO: 38 - DNA, 23 bp, Artificial Sequence
  primer_bind: Degenerate VH forward primer useful for amplifying human VH domains
gaggtgcagctggtggagtctgg

SEQ ID NO: 39 - DNA, 23 bp, Artificial Sequence
  primer_bind: Degenerate VH forward primer useful for amplifying human VH domains
caggtgcagctgcaggagtcggg

SEQ ID NO: 40 - DNA, 23 bp, Artificial Sequence
  primer_bind: Degenerate VH forward primer useful for amplifying human VH domains
gaggtgcagctgttgcagtctgc

SEQ ID NO: 41 - DNA, 23 bp, Artificial Sequence
  primer_bind: Degenerate VH forward primer useful for amplifying human VH domains
caggtacagctgcagcagtcagg

SEQ ID NO: 42 - DNA, 24 bp, Artificial Sequence
  primer_bind: Degenerate JH reverse primer useful for amplifying human VH domains
tgaggagacggtgaccagggtgcc

SEQ ID NO: 43 - DNA, 24 bp, Artificial Sequence
  primer_bind: Degenerate JH reverse primer useful for amplifying human VH domains
tgaagagacggtgaccattgtccc

SEQ ID NO: 44 - DNA, 24 bp, Artificial Sequence
  primer_bind: Degenerate JH reverse primer useful for amplifying human VH domains
tgaggagacggtgaccagggttcc

SEQ ID NO: 45 - DNA, 24 bp, Artificial Sequence
  primer_bind: Degenerate JH reverse primer useful for amplifying human VH domains
tgaggagacggtgaccgtggtccc

SEQ ID NO: 46 - DNA, 23 bp, Artificial Sequence
  primer_bind: Degenerate Vkappa forward primer useful for amplifying human VL domains
gacatccagatgacccagtctcc

SEQ ID NO: 47 - DNA, 23 bp, Artificial Sequence
  primer_bind: Degenerate Vkappa forward primer useful for amplifying human VL domains
gatgttgtgatgactcagtctcc

SEQ ID NO: 48 - DNA, 23 bp, Artificial Sequence
  primer_bind: Degenerate Vkappa forward primer useful for amplifying human VL domains
gatattgtgatgactcagtctcc

SEQ ID NO: 49 - DNA, 23 bp, Artificial Sequence
  primer_bind: Degenerate Vkappa forward primer useful for amplifying human VL domains
gaaattgtgttgacgcagtctcc

SEQ ID NO: 50 - DNA, 23 bp, Artificial Sequence
  primer_bind: Degenerate Vkappa forward primer useful for amplifying human VL domains
gacatcgtgatgacccagtctcc

SEQ ID NO: 51 - DNA, 23 bp, Artificial Sequence
  primer_bind: Degenerate Vkappa forward primer useful for amplifying human VL domains
gaaacgacactcacgcagtctcc

SEQ ID NO: 52 - DNA, 23 bp, Artificial Sequence
  primer_bind: Degenerate Vkappa forward primer useful for amplifying human VL domains
gaaattgtgctgactcagtctcc

SEQ ID NO: 53 - DNA, 23 bp, Artificial Sequence
  primer_bind: Degenerate Vlambda forward primer useful for amplifying human VL domains
cagtctgtgttgacgcagccgcc

SEQ ID NO: 54 - DNA, 23 bp, Artificial Sequence
  primer_bind: Degenerate Vlambda forward primer useful for amplifying human VL domains
cagtctgccctgactcagcctgc

SEQ ID NO: 55 - DNA, 23 bp, Artificial Sequence
  primer_bind: Degenerate Vlambda forward primer useful for amplifying human VL domains
tcctatgtgctgactcagccacc

SEQ ID NO: 56 - DNA, 23 bp, Artificial Sequence
  primer_bind: Degenerate Vlambda forward primer useful for amplifying human VL domains
tcttctgagctgactcaggaccc

SEQ ID NO: 57 - DNA, 23 bp, Artificial Sequence
  primer_bind: Degenerate Vlambda forward primer useful for amplifying human VL domains
cacgttatactgactcaaccgcc

SEQ ID NO: 58 - DNA, 23 bp, Artificial Sequence
  primer_bind: Degenerate Vlambda forward primer useful for amplifying human VL domains
caggctgtgctcactcagccgtc

SEQ ID NO: 59 - DNA, 23 bp, Artificial Sequence
  primer_bind: Degenerate Vlambda forward primer useful for amplifying human VL domains
aattttatgctgactcagcccca

SEQ ID NO: 60 - DNA, 24 bp, Artificial Sequence
  primer_bind: Degenerate Jkappa reverse primer useful for amplifying human VL domains
acgtttgatttccaccttggtccc

SEQ ID NO: 61 - DNA, 24 bp, Artificial Sequence
  primer_bind: Degenerate Jkappa reverse primer useful for amplifying human VL domains
acgtttgatctccagcttggtccc

SEQ ID NO: 62 - DNA, 24 bp, Artificial Sequence
  primer_bind: Degenerate Jkappa reverse primer useful for amplifying human VL domains
acgtttgatatccactttggtccc

SEQ ID NO: 63 - DNA, 24 bp, Artificial Sequence
  primer_bind: Degenerate Jkappa reverse primer useful for amplifying human VL domains
acgtttgatctccaccttggtccc

SEQ ID NO: 64 - DNA, 24 bp, Artificial Sequence
  primer_bind: Degenerate Jkappa reverse primer useful for amplifying human VL domains
acgtttaatctccagtcgtgtccc

SEQ ID NO: 65 - DNA, 23 bp, Artificial Sequence
  primer_bind: Degenerate Jlambda reverse primer useful for amplifying human VL domains
cagtctgtgttgacgcagccgcc

SEQ ID NO: 66 - DNA, 23 bp, Artificial Sequence
  primer_bind: Degenerate Jlambda reverse primer useful for amplifying human VL domains
cagtctgccctgactcagcctgc

SEQ ID NO: 67 - DNA, 23 bp, Artificial Sequence
  primer_bind: Degenerate Jlambda reverse primer useful for amplifying human VL domains
tcctatgtgctgactcagccacc

SEQ ID NO: 68 - DNA, 23 bp, Artificial Sequence
  primer_bind: Degenerate Jlambda reverse primer useful for amplifying human VL domains
tcttctgagctgactcaggaccc

SEQ ID NO: 69 - DNA, 23 bp, Artificial Sequence
  primer_bind: Degenerate Jlambda reverse primer useful for amplifying human VL domains
cacgttatactgactcaaccgcc

SEQ ID NO: 70 - DNA, 23 bp, Artificial Sequence
  primer_bind: Degenerate Jlambda reverse primer useful for amplifying human VL domains
caggctgtgctcactcagccgtc

SEQ ID NO: 71 - DNA, 23 bp, Artificial Sequence
  primer_bind: Degenerate Jlambda reverse primer useful for amplifying human VL domains
aattttatgctgactcagcccca

SEQ ID NO: 72 - protein, 15 aa, Artificial Sequence
  turn: Linker peptide that may be used to join VH and VL domains in an scFv.
GGGGSGGGGSGGGGS

SEQ ID NO: 73 - protein, 101 aa, Homo sapiens [sequence omitted]

SEQ ID NO: 74 - protein, 58 aa, Homo sapiens
  SITE (24): Xaa equals any of the naturally occurring L-amino acids
RPSLPKCAALVHVPNGPSPHAPPXSGVGAPSEVSESLKCSFVRPLCSDSPGQATSNPL

SEQ ID NO: 75 - protein, 119 aa, Homo sapiens
DLDLMESGVSTHNMSSWTLGIHCEQAGWGLPAQIGAILFCILFQGVLNTLKQVEAPAPDWELLERPPCVCVVLSWSHIESGWGSSTRQSPSNSQVLAPSGKADTLSWRRPRKSGLRVAA

SEQ ID NO: 76 - protein, 90 aa, Homo sapiens
  SITE (5): Xaa equals any of the naturally occurring L-amino acids
VTCQXVLPSPVYLCNYFCKHCILCGRHLLAPSLGFSLSSRPACTSLGCSGVSAPHSRPGCQAQPAGARDPAACPKHLFLGDGVGAAPQEV

SEQ ID NO: 77 - protein, 70 aa, Homo sapiens
  SITE (29): Xaa equals any of the naturally occurring L-amino acids
  SITE (34): Xaa equals any of the naturally occurring L-amino acids
  SITE (37): Xaa equals any of the naturally occurring L-amino acids
MDPAAVALLALSLPCALVGVQWEQAPWGXWRLSXSAXTPETPSWRLCPLRDYPKPGQRSGGDRGSHIRSL

SEQ ID NO: 78 - protein, 194 aa, Homo sapiens
  SITE (3): Xaa equals any of the naturally occurring L-amino acids
  SITE (17): Xaa equals any of the naturally occurring L-amino acids
  SITE (33): Xaa equals any of the naturally occurring L-amino acids
QWXGQGSLCPWYCCPGXVSAVTLLPSWWLLRPXFVLLFLPKCLSSPSCIKYPCCATNYLELGDFTTTACQRPAVDEGLGGMAGPAQGSLAEVGAEAARHWRLGLSHTPWLLGGCILLSSLSSRGCTLGCRPPVSLTGYSWGSLRSWRCPQPPSPRLPPPHTLRPQRFVRVHEILELPGCSFCNIFNICNPVKYQ

SEQ ID NO: 79 - protein, 103 aa, Homo sapiens
MDPAAVALLALSLPCALVGVQWEQAPWGPWRLSLLSPHPRDPIVAPVSTQGLSQAWPEVGRGQREPHRSLYQPLSYHRVGALPSHRVSGLWAPPSCTGPRGHF

SEQ ID NO: 80 - protein, 477 aa, Homo sapiens [sequence omitted]

SEQ ID NO: 81 - protein, 445 aa, Homo sapiens
MAAPTPARPVLTHLLVALFGMGSWAAVNGIWVELPVVVKELPEGWSLPSYVSVLVALGNLGLLVVTLWRRLAPGKDEQVPIRVVQVLGMVGTALLASLWHHVAPVAGQLHSVAFLALAFVLALACCAPNVTFLPFLSHLPPRFLRSFFLGQGLSALLPCVLALVQGVGRLECPPAPINGTPGPPLDFLERFPASTFFWALTALLVASAAAFQGLLLLLPPPPSVPTGELGSGLQVGAPGAEEEVEESSPLQEPPSQAAGTTPGPDPKAYQLLSARSACLLGLLAATNALTNGVLPAVQSFSCLPYGRLAYHLAVVLGSAANPLACFLAMGVLCRSLAGLGGLSLLGVFCGGYLMALAVLSPCPPLVGTSAGVVLVVLSWVLCLGVFSYVKVAASSLLHGGGRPALLAAGVAIQVGSLLGAVAMFPPTSIYHVFHSRKDCADPCDS

SEQ ID NO: 82 - protein, 264 aa, Homo sapiens
  SITE (196): Xaa equals any of the naturally occurring L-amino acids
  SITE (224): Xaa equals any of the naturally occurring L-amino acids
  SITE (233): Xaa equals any of the naturally occurring L-amino acids
MLRLFETFLETAPQLTLVLAIMLQSGRAEYYQWVGICTSFLGISWALLDYHRALRTCLPSKPLLGLGSSVIYFLWNLLLLWPRVLAVALFSALFPSYVALHFLGLWLVLLLWVWLQGTDFMPDPSSEWLYRVTVATILYFSWFNVAEGRTRGRAIIHFAFLLSDSILLVATWVTHSSWLPSGIPLQLWLPVGCGCXFLGLALRLVYYHWLHPSCCWKPDPDQVXGARSLLSPXGYQLPQNRRMTHLAQKFFPKAKDEAASPVKG

SEQ ID NO: 83 - protein, 115 aa, Homo sapiens
  SITE (60): Xaa equals any of the naturally occurring L-amino acids
  SITE (73): Xaa equals any of the naturally occurring L-amino acids
  SITE (75): Xaa equals any of the naturally occurring L-amino acids
  SITE (82): Xaa equals any of the naturally occurring L-amino acids
LPYPGLGGHRGCPLEFFLPSPTPFIQFMKQIFAKSSLCARNIILSLQPGTRPATSLASSXTCTNQSRVRSQMXEXRDAQLWXAPVRTSGISVKLAWPLLLLSRGCFSTKSLVSLV

SEQ ID NO: 84 - protein, 264 aa, Homo sapiens
MLRLFETFLETAPQLTLVLAIMLQSGRAEYYQWVGICTSFLGISWALLDYHRALRTCLPSKPLLGLGSSVIYFLWNLLLLWPRVLAVALFSALFPSYVALHFLGLWLVLLLWVWLQGTDFMPDPSSEWLYRVTVATILYFSWFNVAEGRTRGRAIIHFAFLLSDSILLVATWVTHSSWLPSGIPLQLWLPVGCGCFFLGLALRLVYYHWLHPSCCWKPDPDQVDGARSLLSPEGYQLPQNRRMTHLAQKFFPKAKDEAASPVKG

SEQ ID NO: 85 - protein, 57 aa, Homo sapiens
MNVFLSLPLGSSLPPLLFPPSLPSLFFPLPLYLSFSAPSPATTPGFISLPGHIPSSS

SEQ ID NO: 86 - protein, 49 aa, Homo sapiens
  SITE (26): Xaa equals any of the naturally occurring L-amino acids
CHPQQPSCRIPLFVLFISQTSQHLGXIEGAYVEILGAGSPNTSETIPNN

SEQ ID NO: 87 - protein, 52 aa, Homo sapiens
  SITE (50): Xaa equals any of the naturally occurring L-amino acids
KEPTLKYWGRVPPILLKLFQTIEKEGHLPNSFYEASIILILKPGRDTAKXKK

SEQ ID NO: 88 - protein, 155 aa, Homo sapiens [sequence omitted]

SEQ ID NO: 89 - protein, 91 aa, Homo sapiens
  SITE (41): Xaa equals any of the naturally occurring L-amino acids
VWRRCVSWRSIRAQVTFPEDFLSLSSSVQFQVIHVLLDPGXTGISTDLLASFGLEYHSWLGAEAAGLIVIYHKVARKLPRGVRKAAGGGRV

SEQ ID NO: 90 - protein, 21 aa, Homo sapiens
DLHIKLLEHYCLTSCKKVLQL

SEQ ID NO: 91 - protein, 67 aa, Homo sapiens
  SITE (13): Xaa equals any of the naturally occurring L-amino acids
PQSPQRGCYSMLXVLSVSHPQPNKWRCVVPRGPFSHCLASRRGVLQGYSFVCTCRLVGPEFFSHVQE

SEQ ID NO: 92 - protein, 21 aa, Homo sapiens
DLHIKLLEHYCLTSCKKVLQL

SEQ ID NO: 93 - protein, 67 aa, Homo sapiens [sequence omitted]

SEQ ID NO: 94 - protein, 44 aa, Homo sapiens
MLSSILSQLMVSKPWGVFISFSFISLSFYHAISISSVPSGRQVV

SEQ ID NO: 95 - protein, 150 aa, Homo sapiens
  SITE (12): Xaa equals any of the naturally occurring L-amino acids
  SITE (38): Xaa equals any of the naturally occurring L-amino acids
  SITE (43): Xaa equals any of the naturally occurring L-amino acids
  SITE (145): Xaa equals any of the naturally occurring L-amino acids
CPPPPKRGGIEXELGKLWPTFETFRANRRTMLLEPLGXPGGGXRPFWKRARGVTSEAIVTGRCNHCPDCGKAWREQGESTPSTCPFDPLTCWWLALAKPETGGQEPLSVAAYGGQPSEVKAGQKVEKGLGGTHGEQSTKFTPFVXWHWKI

SEQ ID NO: 96 - protein, 35 aa, Homo sapiens
MVSKPWGVFISFSFISLSFYHAISISSVPSGRQVV

SEQ ID NO: 97 - protein, 13 aa, Homo sapiens
MKSLHGRLLWQSA

SEQ ID NO: 98 - protein, 13 aa, Homo sapiens
MKSLHGRLLWQSA

SEQ ID NO: 99 - protein, 353 aa, Homo sapiens
  SITE (260): Xaa equals any of the naturally occurring L-amino acids
MPWPLLLLLAVSGAQTTRPCFPGCQCEVETFGLFDSFSLTRVDCSGLGPHIMPVPIPLDTAHLDLSSNRLEMVNESVLAGPGYTTLAGLDLSHNLLTSISPTAFSRLRYLESLDLSHNGLTALPAESFTSSPLSDVNLSHNQLREVSVSAFTTHSQGRALHVDLSHNLIHRLVPHPTRAGLPAPTIQSLNLAWNRLHAVPNLRDLPLRYLSLDGNPLAVIGPGAFAGLGGLTHLSLASLQRLPELAPSGFRELPGLQVLXLSGNPKLNWAGAEVFSGLSSLQELDLSGTNLVPLPEALLLHLPALQSVSVGQDVRCRRLVREGTYPRRPGSSPKVALHCVDTRESAARGPTIL

SEQ ID NO: 100 - protein, 353 aa, Homo sapiens
MPWPLLLLLAVSGAQTTRPCFPGCQCEVETFGLFDSFSLTRVDCSGLGPHIMPVPIPLDTAHLDLSSNRLEMVNESVLAGPGYTTLAGLDLSHNLLTSISPTAFSRLRYLESLDLSHNGLTALPAESFTSSPLSDVNLSHNQLREVSVSAFTTHSQGRALHVDLSHNLIHRLVPHPTRAGLPAPTIQSLNLAWNRLHAVPNLRDLPLRYLSLDGNPLAVIGPGAFAGLGGLTHLSLASLQRLPELAPSGFRELPGLQVLDLSGNPKLNWAGAEVFSGLSSLQELDLSGTNLVPLPEALLLHLPALQSVSVGQDVRCRRLVREGTYPRRPGSSPKVALHCVDTRESAARGPTIL

SEQ ID NO: 101 - protein, 285 aa, Homo sapiens
  SITE (259): Xaa equals any of the naturally occurring L-amino acids
  SITE (262): Xaa equals any of the naturally occurring L-amino acids
  SITE (280): Xaa equals any of the naturally occurring L-amino acids
MGFLQLLVVAVLASEHRVAGAAEVFGNSSEGLIEFSVGKFRYFELNRPFPEEAILHDISSNVTFLIFQIHSQYQNTTVSFSPTLLSNSSETGTASGLVFILRPEQSTCTWYLGTSGIQPVQNMAILLSYSERDPVPGGCNLEFDLDIDPNIYLEYNFFETTIKFAPANLGYARGVDPPPCDAGTDQDSRWRLQYDVYQYFLPENDLTEEMLLKHLQRMVSVPQVKASALKVVTLTANDKTSVSFSSLPGQGVIYNVIVXGPXSKYICCLHSCSHIRLQLXRAGRG

SEQ ID NO: 102 - protein, 417 aa, Homo sapiens
LFLFSKYTHSIRIQLFPFLRGVDPPPCDAGTDQDSRWRLQYDVYQYFLPENDLTEEMLLKHLQRMVSVPQVKASALKVVTLTANDKTSVSFSSLPGQGVIYNVIVWDPFLNTSAAYIPAHTYACSFEAGEGSCASLGRVSSKVFFTLFALLGFFICFFGHRFWKTELFFIGFIIMGFFFYILITRLTPIKYDVNLILTAVTGSVGGMFLVAVWWRFGILSICMLCVGLVLGFLISSVTFFTPLGNLKIFHDDGVFWVTFSCIAILIPVVFMGCLRILNILTCGVIGSYSVVLAIDSYWSTSLSYITLNVLKRALNKDFHRAFTNVPFQTNDFIILAVWGMLAVSGITLQIRRERGRPFFPPHPYKLWKQERERRVTNILDPSYHIPPLRERLYGRLTQIKGLFQKEQPAGERTPLLL

SEQ ID NO: 103 - protein, 363 aa, Homo sapiens
MGFLQLLVVAVLASEHRVAGAAEVFGNSSEGLIEFSVGKFRYFELNRPFPEEAILHDISSNVTFLIFQIHSQYQNTTVSFSPTLLSNSSETGTASGLVFILRPEQSTCTWYLGTSGIQPVQNMAILLSYSERDPVPGGCNLEFDLDIDPNIYLEYNFFETTIKFAPANLGYARGVDPPPCDAGTDQDSRWRLQYDVYQYFLPENDLTEEMLLKHLQRMVSVPQVKASALKVVTLTANDKTSVSFSSLPGQGVIYNVIVWDLFLNTSAAYIPAHTYACSFEAGEGSCASLGRVSSKVFFTLFALLGFFICFFGQRFWKTELFFIGFIIMGFFFYILITRLTPIKYDAEHTDLWSHWLLFGGFSH

SEQ ID NO: 104 - protein, 79 aa, Homo sapiens
  SITE (42): Xaa equals any of the naturally occurring L-amino acids
  SITE (49): Xaa equals any of the naturally occurring L-amino acids
  SITE (69): Xaa equals any of the naturally occurring L-amino acids
  SITE (76): Xaa equals any of the naturally occurring L-amino acids
MLVKGEGVRLVLRLLGRNGLHLAPLPALLLHFLMLPLSAPVXYSLPAGXCLQGTGSSSFYSVKFSGSLXGGKGKPXNWP

SEQ ID NO: 105 - protein, 71 aa, Homo sapiens [sequence omitted]

SEQ ID NO: 106 - protein, 31 aa, Homo sapiens
MFEALWATDYLCCLFLFVSFFRPLQKCKNHS

SEQ ID NO: 107 - protein, 26 aa, Homo sapiens [sequence omitted]

SEQ ID NO: 108 - protein, 31 aa, Homo sapiens; identical to SEQ ID NO: 106

SEQ ID NO: 109 - protein, 118 aa, Homo sapiens
MEFVSGGKTEILMLFTLLVSCYVFLPLALPCFAFFFSFWPIPFYMCPQQRWGDTEHPGSFPALLGRPRLQAPAVETLKGNKQPSTLPDPRLFREAAHFHPGPRTPSLCPTRISLNGRD

SEQ ID NO: 110 - protein, 157 aa, Homo sapiens
SCLPPLPLNLPLPPCLCPLLQLNAAMTRKEKTKEGQRAAQFSAGADAGSGGGLSRQKDTKRPMLLVIHDVVLELLTSSDCHANPRKYPTCQKSEVLGVSIYVSICPSTRPRDKNKTKKRCQVLEAVLVSKPSGSCHQGSFEIVPHVKGNLAFTSSNH

SEQ ID NO: 111 - protein, 118 aa, Homo sapiens; identical to SEQ ID NO: 109

SEQ ID NO: 112 - protein, 74 aa, Homo sapiens
LALHRCSLSCLQVSVCGVGYGEENLHGGPPGLVVQAVPRHILIPSMGHLKMNNNSQNFCEIKSSFKRSHLSKRF

SEQ ID NO: 113 - protein, 199 aa, Homo sapiens
MKSGLWYFFLFCLRIKVLTGEINGSANYEMFIFHNGGVQILCKYPDIVQQFKMQLLKGGQILCDLTKTKGSGNTVSIKSLKFCHSQLSNNSVSFFLYNLDHSHANYYFCNLSIFDPPPFKVTLTGGYLHIYESQLCCQLKFWLPIGCAAFVVVCILGCILICWLTKKKYSSSVHDPNGEYMFMRAVNTAKKSRLTDVTL

SEQ ID NO: 114 - protein, 199 aa, Homo sapiens; identical to SEQ ID NO: 113

SEQ ID NO: 115 - protein, 91 aa, Homo sapiens
  SITE (12): Xaa equals any of the naturally occurring L-amino acids
  SITE (49): Xaa equals any of the naturally occurring L-amino acids
  SITE (51): Xaa equals any of the naturally occurring L-amino acids
MVLRGWGLAWSXSPVVCGYSGDMKGVCWGRSDHSLLPSEILLPPAPCPXSXVLHNPPPTPHLPSPVLVRIQEAPTWAQRSSLGASPLHKGD

SEQ ID NO: 116 - protein, 6 aa, Homo sapiens
WALPMS

SEQ ID NO: 117 - protein, 14 aa, Homo sapiens
GCSLYNSFNNLLCL

SEQ ID NO: 118 - protein, 4 aa, Homo sapiens
LREL

SEQ ID NO: 119 - protein, 91 aa, Homo sapiens
MVLRGWGLAWSLSPVVCGYSGDMKGVCWGRSDHSLLPSEILLPPAPCPSSAVLHNPPPTPHLPSPVLVRIQEAPTWAQRSSLGASPLHKGD

SEQ ID NO: 120 - protein, 75 aa, Homo sapiens
EDMPRRKEELTDYQKKKVILQNLKHSLFLSLLSHYFYSNPLEYLHFASEQRDKFFSHHVCTGVVLILDIAGTNFS

SEQ ID NO: 121 - protein, 56 aa, Homo sapiens
MMIYFALLLASLFFLLKVKSHFGCKNVTTTSARIFLKPLCTPKSIFPLSRYGRMSS

SEQ ID NO: 122 - protein, 56 aa, Homo sapiens; identical to SEQ ID NO: 121

SEQ ID NO: 123 - protein, 59 aa, Homo sapiens [sequence omitted]

SEQ ID NO: 124 - protein, 114 aa, Homo sapiens
  SITE (7): Xaa equals any of the naturally occurring L-amino acids
  SITE (22): Xaa equals any of the naturally occurring L-amino acids
  SITE (24): Xaa equals any of the naturally occurring L-amino acids
  SITE (111): Xaa equals any of the naturally occurring L-amino acids
QRAMACXFGILLIVSATLCFGXLXGFLMTLPQKRKSFQSKSFVRLKDVTAYMWEKVLTFLRLETPKLEEAEMVENHNYYLDEFANLLDELLMKINGLSDSLQLPLLEKTSXNTG

SEQ ID NO: 125 - protein, 85 aa, Homo sapiens
  SITE (81): Xaa equals any of the naturally occurring L-amino acids
  SITE (84): Xaa equals any of the naturally occurring L-amino acids
MDILMLLLLLCVIYGRFSQDEYSLNQAIRKEFTRNARNCLGGLRNIADWWDWSLTTLLDGLYPGGTPSARVPGASAWSSWXKMXT

SEQ ID NO: 126 - protein, 561 aa, Homo sapiens
MDILMLLLLLCVIYGRFSQDEYSLNQAIRKEFTRNARNCLGGLRNIADWWDWSLTTLLDGLYPGGTPSARVPGAQPGALGGKCYLIGSSVIRQLKVFPRHLCKPPRPFSALIEDSIPTCSPEVGGPENPYLIDPENQNVTLNGPGGCGTREDCVLSLGRTRTEAHTALSRLRASMWIDRSTRAVSVHFTLYNPPTQLFTSVSLRVEILPTGSLVPSSLVESFSIFRSDSALQYHLMLPQLVFLALSLIHLCVQLYRMMDKGVLSYWRKPRNWLELSVVGVSLTYYAVSGHLVTLAGDVTNQFHRGLCRAFMDLTLMASWNQRARWLRGILLFLFTLKCVYLPGIQNTMASCSSMMRHSLPSIFVAGLVGALMLAALSHLHRFLLSMWVLPPGTFTDAFPGLLFHFPRRSQKDCLLGLSKSDQRAMACYFGILLIVSATLCFGMLRGFLMTLPQKRKSFQSKSFVRLKDVTAYMWEKVLTFLRLETPKLEEAEMVENHNYYLDEFANLLDELLMKINGLSDSLQLPLLEKTSNNTGEARTEESPLVDISSYQAAEPADIKDF

SEQ ID NO: 127 - protein, 88 aa, Homo sapiens
  SITE (1): Xaa equals any of the naturally occurring L-amino acids
  SITE (19): Xaa equals any of the naturally occurring L-amino acids
  SITE (81): Xaa equals any of the naturally occurring L-amino acids
XHKTFPSEGSSCLSSVTLXTTAQAYFTLPPPTHHCPLSATKPHYSSNDASLVSGKPIWCTKMLCNTKWLLPLILLNNVNSXRINFMLC

SEQ ID NO: 128 - protein, 56 aa, Homo sapiens
MWKVLRPSLFTAGLFTASFFYSDLKVSTELMKLQHMVFKSFPLKCTLENWVPQPHY

SEQ ID NO: 129 - protein, 58 aa, Homo sapiens [sequence omitted]

SEQ ID NO: 130 - protein, 32 aa, Homo sapiens
CLETFWSLYLGGWGMVGCVCYWHPVNRSQGCR

SEQ ID NO: 131 - protein, 199 aa, Homo sapiens
  SITE (142): Xaa equals any of the naturally occurring L-amino acids
MKLGCVLMAWALYLSLGVLWVAQMLLAASFETLQCEGPVCTEESSCHTEDDLTDAREAGFQVKAYTFSEPFHLIVSYDWLILQGPAKPVFEGDLLVLRCQAWQDWPLTQVTFYRDGSALGPPGPNREFSITVVQKADSGHYXCSGIFQSPGPGIPETASVVAITVQELFPAPILLLQGWKDSAKQGGSPQNSRSPQLQK

SEQ ID NO: 132 - protein, 2 aa, Homo sapiens
SW

SEQ ID NO: 133 - protein, 359 aa, Homo sapiens
MKLGCVLMAWALYLSLGVLWVAQMLLAASFETLQCEGPVCTEESSCHTEDDLTDAREAGFQVKAYTFSEPFHLIVSYDWLILQGPAKPVFEGDLLVLRCQAWQDWPLTQVTFYRDGSALGPPGPNREFSITVVQKADSGHYHCSGIFQSPGPGIPETASVVAITVQELFPAPILRAVPSAEPQAGGPMTLSCQTKLPLQRSAARLLFSFYKDGRIVQSRGLSSEFQIPTASEDHSGSYWCEAATEDNQVWKQSPQLEIRVQGASSSAAPPTLNPAPQKSAAPGTAPEEAPGPLPPPPTPSSEDPGFSSPLGMPDPHLYHQMGLLLKHMQDVRVLLGHLLMELRELSGHRKPGTTKATAE

SEQ ID NO: 134 - protein, 5 aa, Homo sapiens
MSRLL

SEQ ID NO: 135 - protein, 5 aa, Homo sapiens
MSRLL

SEQ ID NO: 136 - protein, 63 aa, Homo sapiens [sequence omitted]

SEQ ID NO: 137 - protein, 438 aa, Homo sapiens
  SITE (42): Xaa equals any of the naturally occurring L-amino acids
LTITVHDPNAAQWYYGMSWGLRLYIPGFDVGTMFTIQKKILXSWSPPKPIRPLTDLGDPIFQKHPDKVDLTVPQPFLVPRPQLQQQHLQPSLMSILGGVHHLLNLTQPKLAQDCWLCLKAKPPYYVGLGVEATLKRGPLSCHTRPRALTIGDVSGNASCLISTGYNLSASPFQATCNQSLLTYISTSVSYQAPNNTWLACTSGLTRCINGTEPGPLLCVLVHVLPQVYVYSGPEGRQLIAPPELHPRLHQAVPLLVPLLAGLSIAGSAAIGTAALVQGETGLISLSQQVDADFSNLQSAIDILHSQVESLAEVVLQNCRCLDLLFLSQGGLCAALGESCCFYANQSGVIKGTVKKVRENLDRHQQERENNIPWYQSMFNWNPWLTTLITGLAGPLLILLLSLIFGPCILNSFLNFIKQRIASVKLTYLKTQYDTLVNN

SEQ ID NO: 138 - protein, 438 aa, Homo sapiens
LTITVHDPNAAQWYYGMSWGLRLYIPGFDVGTMFTIQKKILVSWSPPKPIRPLTDLGDPIFQKHPDKVDLTVPQPFLVPRPQLQQQHLQPSLMSILGGVHHLLNLTQPKLAQDCWLCLKAKPPYYVGLGVEATLKRGPLSCHTRPRALTIGDVSGNASCLISTGYNLSASPFQATCNQSLLTYISTSVSYQAPNNTWLACTSGLTRCINGTEPGPLLCVLVHVLPQVYVYSGPEGRQLIAPPELHPRLHQAVPLLVPLLAGLSIAGSAAIGTAALVQGETGLISLSQQVDADFSNLQSAIDILHSQVESLAEVVLQNCRCLDLLFLSQGGLCAALGESCCFYANQSGVIKGTVKKVRENLDRHQQERENNIPWYQSMFNWNPWLTTLITGLAGPLLILLLSLIFGPCILNSFLNFIKQRIASVKLTYLKTQYDTLVNN

SEQ ID NO: 139 - protein, 62 aa, Homo sapiens
MFCRNWRCEFMMLSHNTAVMICSFSQNDFHAALCCSSVSELPYLFLVCSTYKCSCHAVLFFC

SEQ ID NO: 140 - protein, 62 aa, Homo sapiens; identical to SEQ ID NO: 139

SEQ ID NO: 141 - protein, 76 aa, Homo sapiens
INFTYKRLSLDFIYIYMCVCVCVCVCVCVCVYLKRTCASIKGNKMREYIIDFVKSKYLNYGFSIFKNSCSFCTYFF

SEQ ID NO: 142 - protein, 42 aa, Homo sapiens
MFLFITFTILAIFIIEPRNLRVDLNLIKFQTSWPKTLVEEQN

SEQ ID NO: 143 - protein, 42 aa, Homo sapiens; identical to SEQ ID NO: 142

SEQ ID NO: 144 - protein, 23 aa, Homo sapiens
AWIQCTLLLYPRRTSQGIHQVPG

SEQ ID NO: 145 - protein, 20 aa, Homo sapiens
LLMRQPWVGQGWGPVVEETC

SEQ ID NO: 146 - protein, 322 aa, Homo sapiens
  SITE (131): Xaa equals any of the naturally occurring L-amino acids
  SITE (185): Xaa equals any of the naturally occurring L-amino acids
  SITE (218): Xaa equals any of the naturally occurring L-amino acids
  SITE (220): Xaa equals any of the naturally occurring L-amino acids
  SITE (250): Xaa equals any of the naturally occurring L-amino acids
  SITE (312): Xaa equals any of the naturally occurring L-amino acids
MALPPGPAALRHTLLLLPALLSSGWGELEPQIDGQTWAERALRENERHAFTCRVAGGPGTPRLAWYLDGQLQEASTSRLLSVGGEAFSGGTSTFTVTAHRAQHELNCSLQDPRSGRSANASVILNVQFKPXIAQVGAKYQEAQGPGLLVVLFALVRANPPANVTWIDQDGPVTVNTSDFLVLDAXNYPWLTNHTVQLQLRSLAHNLSVVATNDVGVTXAXLPAPGPSRHPSLISSDSNNLKLNNVRLPRXNMSLPSNLQLNDLTPDSRAVKPADRQMAQNNSRPELLDPEPGGLLTSQGFIRLPVLGYIYRXSSVSSDEIWL

SEQ ID NO: 147 - protein, 322 aa, Homo sapiens
MALPPGPAALRHTLLLLPALLSSGWGELEPQIDGQTWAERALRENERHAFTCRVAGGPGTPRLAWYLDGQLQEASTSRLLSVGGEAFSGGTSTFTVTAHRAQHELNCSLQDPRSGRSANASVILNVQFKPEIAQVGAKYQEAQGPGLLVVLFALVRANPPANVTWIDQDGPVTVNTSDFLVLDAQNYPWLTNHTVQLQLRSLAHNLSVVATNDVGVTSASLPAPGPSRHPSLISSDSNNLKLNNVRLPRENMSLPSNLQLNDLTPDSRAVKPADRQMAQNNSRPELLDPEPGGLLTSQGFIRLPVLGYIYRVSSVSSDEIWL

SEQ ID NO: 148 - protein, 25 aa, Homo sapiens
MISLLWTLKLFSRNLDYSQKRKSWC

SEQ ID NO: 149 - protein, 25 aa, Homo sapiens
MISLLWTLKLFSRNLDYSQKRKSWC

SEQ ID NO: 150 - protein, 18 aa, Homo sapiens
TKSSDFGGGCRNASSSCC

SEQ ID NO: 151 - protein, 26 aa, Homo sapiens
GCFKIVLFFKLVIFAKLFVFVVSINM

SEQ ID NO: 152 - protein, 18 aa, Homo sapiens
TKSSDFGGGCRNASSSCC

SEQ ID NO: 153 - protein, 143 aa, Homo sapiens [sequence omitted]

SEQ ID NO: 154 - protein, 101 aa, Homo sapiens
  SITE (91): Xaa equals any of the naturally occurring L-amino acids
  SITE (93): Xaa equals any of the naturally occurring L-amino acids
  SITE (99): Xaa equals any of the naturally occurring L-amino acids
WESLGLMFLCGPHLTRLLLFLFTLGFCAFINIVLSFPLVCIPFCLGRLYFLLLTEKPHQEACPGDELGTGHLHIGLGAVRLQGPDNMRNEXSXIVVGDXGL

SEQ ID NO: 155 - protein, 35 aa, Homo sapiens
MLNDGKVWVSCFCVVLTSLDFCSFCSLWASVLSLI

SEQ ID NO: 156 - protein, 114 aa, Homo sapiens [sequence omitted]

SEQ ID NO: 157 - protein, 26 aa, Homo sapiens
MCVSPVSVCPFLPSLHFINNWCNVSS

SEQ ID NO: 158 - protein, 106 aa, Homo sapiens
  SITE (36): Xaa equals any of the naturally occurring L-amino acids
GSDGPRERAPVAWLSHSILSLILNKYFLWGFFFFLXAVVCFKLTTWKKHLGYLWFSCLVPASTPTPFESGDSFFCVETRWPRQEVKAAIRKALGTLVPVARLQVTS

SEQ ID NO: 159 - protein, 201 aa, Homo sapiens
  SITE (10): Xaa equals any of the naturally occurring L-amino acids
  SITE (19): Xaa equals any of the naturally occurring L-amino acids
LSSLLPQRLXEPSSSSPGXRTWQLSQKSRGPSRASSMSVLNSLRSSSWWPRLHTHTSMPESPVKRRCLPGVFSLLSGAPCSELSSFSSSSLHSASLSRKAPGSSSPRPATEPLGSIPGALVAARSTGRSEGSGSAMLGGLVLLLLGSDKGLLCAPWDPLVGSMPGGLPPAGPHCGGSSCCCCSWKALYGGGGVGGRFTTSS

SEQ ID NO: 160 - protein, 52 aa, Homo sapiens
MALLLLQALPSPLSARAEPPQDKEACVGTNNQSYICDTGHCCGQSQCCKLLL

SEQ ID NO: 161 - protein, 118 aa, Homo sapiens
LLLLQALPSPLSARAEPPQDKEACVGTNNQSYICDTGHCCGQSQCCNYYYELWWFWLVWTIIIILSCCCVCHHRRAKHRLQAQQRQHEINLIAYREAHNYSALPFYFRFLPNYLLPPL

SEQ ID NO: 162 - protein, 363 aa, Homo sapiens
MERRRLLGGMALLLLQALPSPLSARAEPPQDKEACVGTNNQSYICDTGHCCGQSQCCNYYYELWWFWLVWTIIIILSCCCVCHHRRAKHRLQAQQRQHEINLIAYREAHNYSALPFYFRFLPNYLLPPYEEVVNRPPTPPPPYSAFQLQQQQLLPPQCGPAGGSPPGIDPTRGSQGAQSSPLSEPSRSSTRPPSIADPDPSDLPVDRAATKAPGMEPSGSVAGLGELDPGAFLDKDAECREELLKDDSSEHGAPDSKEKTPGRHRRFTGDSGIEVCVCNRGHHDDDLKEVNTLIDDALDGPLDFCDSCHVRPPGDEEEGLCQPSEEQAREPGHPHLPRPPACLLLNTINEQDSPNSQSNSSPS

SEQ ID NO: 163 - protein, 199 aa, Homo sapiens
  SITE (2): Xaa equals any of the naturally occurring L-amino acids
  SITE (6): Xaa equals any of the naturally occurring L-amino acids
  SITE (14): Xaa equals any of the naturally occurring L-amino acids
  SITE (34): Xaa equals any of the naturally occurring L-amino acids
  SITE (51): Xaa equals any of the naturally occurring L-amino acids
QXKPPXPAAPAAPXAPAPLEKPIRSHEATGGGEXACGVTGASTPEGTAPPXPAAPAPPKGEKEGQRPTQPVYQIQNRGMGTAAPAAMDRELGLGSTRLGTGVSSQILTASSVSCFLQSPAVVGQAKLLPPERMKHSIKLVDDQMNWCDSAIEVPRGPALPELPHILHPLIFHLSVGNTRLEGFEATYSSERGWYQNILT

SEQ ID NO: 164 - protein, 21 aa, Homo sapiens
MKNSFFTVSWALTCSFSWATV

SEQ ID NO: 165 - protein, 21 aa, Homo sapiens
MKNSFFTVSWALTCSFSWATV

SEQ ID NO: 166 - protein, 39 aa, Homo sapiens
MPLFRTFKQLGLFLFLIIPIICSSLPPLGPVQSFLGCLY

SEQ ID NO: 167 - protein, 50 aa, Homo sapiens
MLLLVVTLVNLSIYKLIKLVTALSKKLGAKGVLKNAHFMRCNCGEMRTRS

SEQ ID NO: 168 - protein, 2 aa, Homo sapiens
LL

SEQ ID NO: 169 - protein, 69 aa, Homo sapiens
  SITE (6): Xaa equals any of the naturally occurring L-amino acids
  SITE (13): Xaa equals any of the naturally occurring L-amino acids
  SITE (51): Xaa equals any of the naturally occurring L-amino acids
WYQGKXDLKGLGXVLDGSDGMAGGIPEGMAFTLYLGIWLSSPFPDCCIAFXFAYSSSPLSSGDTFQGPQ

SEQ ID NO: 170 - protein, 135 aa, Homo sapiens
  SITE (33): Xaa equals any of the naturally occurring L-amino acids
  SITE (129): Xaa equals any of the naturally occurring L-amino acids
AKMPWTCSVSDPTSCDSQAQKMPGVRASRQPGXGRQCLLLLHQVQGIWLKACIFPGHKLPEPLKWEARQFQTNLFSTHHSTFKVCLLLLPVHPPSLQFFHSLTSERVPGGSMVNKLTCMLQKKKKKKIXAVRKGI

SEQ ID NO: 171 - protein, 50 aa, Homo sapiens; identical to SEQ ID NO: 167

SEQ ID NO: 172 - protein, 77 aa, Homo sapiens [sequence omitted]

SEQ ID NO: 173 - protein, 77 aa, Homo sapiens [sequence omitted]

SEQ ID NO: 174 - protein, 56 aa, Homo sapiens
CDVKPADVKDIGGTVEASCMNFSWPAPTAQVHTRKRRVWACLRVDVSSEVRPGKAL

SEQ ID NO: 175 - protein, 68 aa, Homo sapiens
  SITE (44): Xaa equals any of the naturally occurring L-amino acids
  SITE (57): Xaa equals any of the naturally occurring L-amino acids
MAQSRVLLLLLLLPPQLAPGTCACREGPRIWPNGGHSLSPEENXLRKKSRLLLIEAXKKPGAWAQAAV

SEQ ID NO: 176 - protein, 85 aa, Homo sapiens
  SITE (26): Xaa equals any of the naturally occurring L-amino acids
MAQSRVLLLLLLLPPQLHLGPVLAVXAPGFGRSGGHSLSPEENEFAEEEPVLVLSPEEPGPGPAAVSCPRDCACSQEGVVDCGGY

SEQ ID NO: 177 - protein, 14 aa, Homo sapiens
MIYQIYGIICSLFP

SEQ ID NO: 178 - protein, 31 aa, Homo sapiens
GPFCDVTTLHLPGLLCTQCSLDPVDLYLWRS

SEQ ID NO: 179 - protein, 14 aa, Homo sapiens
MIYQIYGIICSLFP

SEQ ID NO: 180 - protein, 71 aa, Homo sapiens
  SITE (71): Xaa equals any of the naturally occurring L-amino acids
TMGPGDRHRLPVYLGHCLGCLESGLLAQILPLLGQGRPFMDSLIRVAAERRAGQVLKGTLKRFSERQGRRX

SEQ ID NO: 181 - protein, 204 aa, Homo sapiens
  SITE (1): Xaa equals any of the naturally occurring L-amino acids
  SITE (5): Xaa equals any of the naturally occurring L-amino acids
  SITE (8): Xaa equals any of the naturally occurring L-amino acids
XPSLXGTXAGGSTAVAAALELVDPPGCRNSARAAAELSLLEKSLGLSKGNKYSAQGERQIPVLQTNNGPSLTGLTTIAAHLVKQANKEYLLGSTAEEKAIVQQWLEYRVTQVDGHSSKNDIHTLLKDLNSYLEDKVYLTGYNFTLADILLYYGLHRFIVDLTVQEKEKYLNVSRWFCHIQHYPGIRQHLSSVVFIKNRLYTNSH

SEQ ID NO: 182 - protein, 54 aa, Homo sapiens
MTSPLARLLLPFWCHTLGTMALGTPNPGAMAWGAVGEPNPGAWTVPLGAFLAGR

SEQ ID NO: 183 - protein, 54 aa, Homo sapiens; identical to SEQ ID NO: 182

SEQ ID NO: 184 - protein, 1 aa, Homo sapiens
S

SEQ ID NO: 185 - protein, 3 aa, Homo sapiens
LLC

SEQ ID NO: 186 - protein, 1 aa, Homo sapiens
S

SEQ ID NO: 187 - protein, 5 aa, Homo sapiens
AGTWS

SEQ ID NO: 188 - protein, 45 aa, Homo sapiens
MAGVWNTIALWFLSVFGVISAPTTGTSPTSCRCVGPRPPGCGPAG

SEQ ID NO: 189 - protein, 46 aa, Homo sapiens
  SITE (21): Xaa equals any of the naturally occurring L-amino acids
LINVTNVGIILAVSQPLDDIXEFIIEKRSDYNKYRKENMWLPLNPY

SEQ ID NO: 190 - protein, 304 aa, Homo sapiens
  SITE (15): Xaa equals any of the naturally occurring L-amino acids
  SITE (30): Xaa equals any of the naturally occurring L-amino acids
  SITE (32): Xaa equals any of the naturally occurring L-amino acids
  SITE (187): Xaa equals any of the naturally occurring L-amino acids
MLQFQRTWKYKGEFXLHQGNAERHFMQVTXVXEISTGKRDNEFSNSGRSIPLKSVFLTQQKVPTIQQVHKFDIYDKLFPQNSVIIEYKRLHAEKESLIGNECEEFNQSTYLSKDIGIPPGEKPYESHDFSKLLSFHSLFTQHQTTHFGKLPHGYDECGDAFSCYSFFTQPQRIHSGEKPYACNDCGXAFSPTSFSVNIKELILGRNLMNVRNVTKLSDRVLTLLNIRGSTLERNRLRAMNVGRPLAVMPSLLNIREFTQVRNHMNVKNVIKPSDRVLTLINIRGFTLERNPMNVISVEKPSADA

SEQ ID NO: 191 - protein, 336 aa, Homo sapiens
MDTMNVVMPLAVTHSLLNLREFTVVEKPYACNDCGKAFSHDFFLSEHQRTHIGEKPYECKECNKAFRQSAHLAQHQRIHTGEKPFACNECGKAFSRYAFLVEHQRIHTGEKPYECKECNKAFRQSAHLNQHQRIHTGEKPYECNQCGKAFSRRIALTLHQRIHTGEKPFKCSECGKTFGYRSHLNQHQRIHTGEKPYECIKCGKFFRTDSQLNRHHRIHTGERPFECSKCGKAFSDALVLIHHKRSHAGEKPYECNKCGKAFSCGSYLNQHQRIHTGEKPYECSECGKAFHQILSLRLHQRIHAGEKPYKCNECGNNFSCVSALRRHQRIHNRETL

SEQ ID NO: 192 - protein, 54 aa, Homo sapiens
LAATRKFFLSSHSSSCKKGAMSQKEAPFHRQRLHRERGNRRLGNGGEWGRNWVQ

SEQ ID NO: 193 - protein, 27 aa, Homo sapiens
MHQLFGLFVTLMFASVGGGLGGIILVL

SEQ ID NO: 194 - protein, 106 aa, Homo sapiens
MPGVLGALLGVLVAGLATHEAYGDGLESVFPLIAEGQRSATSQAMHQLFGLFVTLMFASVGGGLGGIILVLCLLDPCALWHWVAPSSMVGGREASQILPYHHQGSC

SEQ ID NO: 195 - protein, 60 aa, Homo sapiens
  SITE (3): Xaa equals any of the naturally occurring L-amino acids
  SITE (17): Xaa equals any of the naturally occurring L-amino acids
NLXCCEPLKGTEIVHLXSSDFKAVACRCSQLNKALPSTTLRGFVCGSSCYISWFPNQETR

SEQ ID NO: 196 - protein, 82 aa, Homo sapiens
  SITE (26): Xaa equals any of the naturally occurring L-amino acids
  SITE (28): Xaa equals any of the naturally occurring L-amino acids
PGNEVTDGQPRQPLRRLRLPCGASLXRXPASPSDAIQRALPGRKLPRWNASPEQRVAVPCGGLTQWLNTGKELALGVRTSET

SEQ ID NO: 197 - protein, 94 aa, Homo sapiens
  SITE (2): Xaa equals any of the naturally occurring L-amino acids
RXPIFIGENFYPPVRGRVGMSACQGGGGGGGGGGGGGGGGGGGGGGGGGGGGVDKLPCLTMCWCGNGAQPARLKVDGIPTGQRKSYADTPAWPG

SEQ ID NO: 198 - protein, 257 aa, Homo sapiens
  SITE (27): Xaa equals any of the naturally occurring L-amino acids
MTAAVFFGCAFIAFGPALALYVFTIAXEPLRIIFLIAGAFFWLVSLLISSLVWFMARVIIDNKDGPTQKYLLIFGAFVSVYIQEMFRFAYYKLLKKASEGLKSINPGETAPSMRLLAYVSGLGFGIMSGVFSFVNTLSDSLGPGTVGIHGDSPQFFLYSAFMTLVIILLHVFWGIVFFDGCEKKKWGILLIVLLTHLLVSAQTFISSYYGINLASAFIILVLMGTWAFLAAGGSCRSLKLCLLCQDKNFLLYNQRSR

SEQ ID NO: 199 - protein, 257 aa, Homo sapiens [sequence omitted]

SEQ ID NO: 200 - protein, 36 aa, Homo sapiens
  SITE (8): Xaa equals any of the naturally occurring L-amino acids
  SITE (12): Xaa equals any of the naturally occurring L-amino acids
  SITE (16): Xaa equals any of the naturally occurring L-amino acids
  SITE (18): Xaa equals any of the naturally occurring L-amino acids
  SITE (19): Xaa equals any of the naturally occurring L-amino acids
  SITE (23): Xaa equals any of the naturally occurring L-amino acids
WRHLTVSXGLQXRLSXRXXWEGXPRSTTAAGWGRTG

SEQ ID NO: 201 - protein, 21 aa, Homo sapiens
HLSLPRLLWTLQIPQCPQLQD

SEQ ID NO: 202 - protein, 78 aa, Homo sapiens
DPQNIYWEHLSIRGFIWWLRCLVINVVLFILLFFLTTPAIIITTMDKFNVTKPVEYLNVRPHAPVTFHAGSQHTDTRP

SEQ ID NO: 203 - protein, 318 aa, Homo sapiens
MHKCYTFLIFMVLLLPSLGLSSLDLFFRWLFDKKFLAEAAIRFECVFLPDNGAFFVNYVIASAFIGNAMDLLRIPGLLMYMIRLCLARSAAERRNVKRHQAYEFRFGAAYAWMMCVFTVVMTYSITCPIIVPFGLMYMLLKHLVDRYNLYYAYLPAKLDKKIHSGAVNQVVAAPILCLFWLLFFSTMRTGFLAPTSMFTFVVLVITIVICLCHVCFGHFKYLSAHNYKIEHTETDTVDPRSNGRPPTAAAVPKSAKYIAQVLQDSEVDGDGDGAPGSSGDEPPSSSSQDEELLMPPDALTDTDFQSCEDSLIENEIHQ

SEQ ID NO: 204 - protein, 65 aa, Homo sapiens
  SITE (9): Xaa equals any of the naturally occurring L-amino acids
  SITE (21): Xaa equals any of the naturally occurring L-amino acids
VVVELINRXQNYFQYIVYLYXKRDGPFYGGTLSMVVFCDVLFLLLLFALFSPITALLSLKRINFI

SEQ ID NO: 205 - protein, 50 aa, Homo sapiens [sequence omitted]

SEQ ID NO: 206 - protein, 90 aa, Homo sapiens
DLTCLLSSNFIIGINVHFFPVPVSEAFICVCMCVLNKCIRYLKNSNLNLNNLKNEIVILCVKVSDVLYSALKTIFIYSSTDTKYILKLLS

SEQ ID NO: 207 - protein, 41 aa, Homo sapiens
MSCLWAGIKFLGFGFCWMDCSLCEPIWVCQIQSLGCHGNLA

SEQ ID NO: 208 - protein, 103 aa, Homo sapiens
SLDTALLSTLCSLAFTAASTSSTVAYVTNPKPLEHLVFGSLITTVCECSLLLRMAHWTLTGHFKAQLSDEELLQLLGLLKRLCLRHDSSGKRDFNDVFSGIHG

SEQ ID NO: 209 - protein, 49 aa, Homo sapiens
MRQTKLEGWLIFPLFSCFSFISLGSDEGPEIFISHLKSLADYSRALVEV

SEQ ID NO: 210 - protein, 49 aa, Homo sapiens; identical to SEQ ID NO: 209

SEQ ID NO: 211 - protein, 489 aa, Homo sapiens
  SITE (79): Xaa equals any of the naturally occurring L-amino acids
  SITE (321): Xaa equals any of the naturally occurring L-amino acids
MPQASEHRLGRTREPPVNIQPRVGSKLPFAPRARSKERRNPASGPNPMLRPLPPRPGLPDERLKKLELGRGRTSGPRPXGPLRADHGVPLPGSPPPTVALPLPSRTNLARSKSVSSGDLRPMGIALGGHRGTGELGAALSRLALRPEPPTLRRSTSLRRLGGFPGPPTLFSIRTEPPASHGSFHMISARSSEPFYSDDKMAHHTLLLGSGHVGLRNLGNTCFLNAVLQCLSSTRPLRDFCLRRDFRQEVPGGGRAQELTEAFADVIGALWHPDSCEAVNPTRFRAVFQKYVPSFSGYSQQDAQEFLKLLMERLHLEINRRXRRAPPILANGPVPSPPRRGGALLEEPELSDDDRANLMWKRYLEREDSKIVDLFVGQLKSCLKCQACGYRSTTFEVFCDLSLPIPKKGFAGGKVSLRDCFNLFTKEEELESENAPVCDRCRQKTRSTKKLTVQRFPRILVLHLNRFSASRGSIKKSSVGVDFSTAATEP

SEQ ID NO: 212 - protein, 463 aa, Homo sapiens
ARGTNLARSKSVSSGDLRPMGIALGGHRGTGELGAALSRLALRPEPPTLRRSTSLRRLGGFPGPPTLFSIRTEPPASHGSFHMISARSSEPFYSDDKMAHHTLLLGSGHVGLRNLGNTCFLNAVLQCLSSTRPLRDFCLRRDFRQEVPGGGRAQELTEAFADVIGALWHPDSCEAVNPTRFRAVFQKYVPSFSGYSQLDAQEFLKLLMERLHLEINRRDRRAPPILANGPVPSPPRRGGALLEEPELSDDDRANLMWKRYLEREDSKIVDLFVGQLKSCLKCQACGYRSTTFEVFCDLSLPIPKKGFAGGKVSLRDCFNLFTKEEELESENAPVCDRCRQKTRSTKKLTVQRFPRILVLHLNRFSASRGSIKKSSVGVDFPLQRLSLGDFASDKAGSPVYQLYALCNHSGSVHYGHYTALCRCQTGWHVYNDSRVSPVSENQVASSEGYVLFYQLMQEPPRCL

SEQ ID NO: 213 - protein, 53 aa, Homo sapiens
KIELMVCTKSLVYVLVFQNNFYINIYIVKKFFLIFGWDIRKYLYYTLSYYNGT

SEQ ID NO: 214 - protein, 9 aa, Homo sapiens
LLSCFYFFL

SEQ ID NO: 215 - protein, 66 aa, Homo sapiens
  SITE (8): Xaa equals any of the naturally occurring L-amino acids
  SITE (11): Xaa equals any of the naturally occurring L-amino acids
  SITE (18): Xaa equals any of the naturally occurring L-amino acids
  SITE (61): Xaa equals any of the naturally occurring L-amino acids
MLLLCYHXFLXFVLGTGXVNIEEAEKLLKPYLNRYPKGAIFLFFAGRIEVIKGNIDAAIRXFEECC

SEQ ID NO: 216 - protein, 66 aa, Homo sapiens; identical to SEQ ID NO: 215
  SITE (8): Xaa equals any of the naturally occurring L-amino acids
  SITE (11): Xaa equals any of the naturally occurring L-amino acids
  SITE (18): Xaa equals any of the naturally occurring L-amino acids
  SITE (61): Xaa equals any of the naturally occurring L-amino acids

SEQ ID NO: 217 - protein, 43 aa, Homo sapiens
MYKITYRVCFLCQPLMVGLGCIGSIAIVLLLLLLVPHVCPKIL

SEQ ID NO: 218 - protein, 43 aa, Homo sapiens; identical to SEQ ID NO: 217

SEQ ID NO: 219 - protein, 79 aa, Homo sapiens
APLAASTILAVASARILAALKSLREFSRSLSPSASALMALTRSDVAWARMRACRTISPASPMELKMFSVTVRMVSVAWS

SEQ ID NO: 220 - protein, 72 aa, Homo sapiens
MGTLMVLTRLAVLLATSLADCTNWRLAVGLVVRAEARRQLLHSAEVCLATMVAAESTWAWVQPGSPKLWQAI

SEQ ID NO: 221 - protein, 72 aa, Homo sapiens; identical to SEQ ID NO: 220

SEQ ID NO: 222 - protein, 43 aa, Homo sapiens
MCRTQFHLFWFIVTELSPVIWAKANQKLSCLSQQTLVLVYFCR

SEQ ID NO: 223 - protein, 84 aa, Homo sapiens
  SITE (36): Xaa equals any of the naturally occurring L-amino acids
  SITE (37): Xaa equals any of the naturally occurring L-amino acids
FSIFKNHISLCWLIIINFKHSFLQSGFSEFFFFKQXXHSFFLVTSKGGTGVGGKECLKMKSLDIEGPRRTGYAKIISNSSTILE

SEQ ID NO: 224 - protein, 43 aa, Homo sapiens; identical to SEQ ID NO: 222

SEQ ID NO: 225 - protein, 27 aa, Homo sapiens
PHCRWPGLYRQLGRRRRSTALLRCHNV

SEQ ID NO: 226 - protein, 37 aa, Homo sapiens
MRKRRPYNRWTGCWLRLAVSCRWAVAISASPWLRLTS

SEQ ID NO: 227 - protein, 37 aa, Homo sapiens; identical to SEQ ID NO: 226

SEQ ID NO: 228 - protein, 153 aa, Homo sapiens
  SITE (98): Xaa equals any of the naturally occurring L-amino acids
MAATQTGTCLMVAALCFVLVLGSLVPCLPEFSSGSQTVKEDPLAADGVYTASQMPSRSLLFYDDGAGLWEDGRSTLLPMEPPDGWEINPGGPAEQRPXDHLQHDHLDSTHETTKYLSEAWPKDGGNGTSPDFSHSKEWFHDRDLGPNTTIKLS

SEQ ID NO: 229 - protein, 153 aa, Homo sapiens
MAATQTGTCLMVAALCFVLVLGSLVPCLPEFSSGSQTVKEDPLAADGVYTASQMPSRSLLFYDDGAGLWEDGRSTLLPMEPPDGWEINPGGPAEQRPRDHLQHDHLDSTHETTKYLSEAWPKDGGNGTSPDFSHSKEWFHDRDLGPNTTIKLS

SEQ ID NO: 230 - protein, 105 aa, Homo sapiens
MCLTTAGFCLLAIHSFALGVQSRQQHSVPIVFEVLPLRVPEPSRVTGCSSFFQTKVLCKQHLLGPRASVNIVLACLACCHRKGLCVHIPANLMSPSSAKLYHSLH

SEQ ID NO: 231 - protein, 37 aa, Homo sapiens
FCLIWSAYLLMCLFLFCLFYFYFSVNARTDLHVKSGL

SEQ ID NO: 232 - protein, 105 aa, Homo sapiens; identical to SEQ ID NO: 230

SEQ ID NO: 233 - protein, 5 aa, Homo sapiens
YSPLC

SEQ ID NO: 234 - protein, 40 aa, Homo sapiens
  SITE (15): Xaa equals any of the naturally occurring L-amino acids
MAYSPLLISLVLAFXPASTYGRASIDFTCFPNHYGISNQY

SEQ ID NO: 235 - protein, 160 aa, Homo sapiens
  SITE (55): Xaa equals any of the naturally occurring L-amino acids
FFDSIGALVPQFLANDDELSSHTYGLLVNKNNHLGHLAVCISQCIWGLLSPCELXGISLGSIILFCPTPCSMQTPSPACWSPSGNPGLAHTLCWRACTLMPLLRLGPYLVTLFALPSETEQLAPSALVVPCEALLLSGFLHRDPCRLPADMQDALLSVDV

SEQ ID NO: 236 - protein, 40 aa, Homo sapiens; identical to SEQ ID NO: 234
  SITE (15): Xaa equals any of the naturally occurring L-amino acids

SEQ ID NO: 237 - protein, 236 aa, Homo sapiens
  SITE (3): Xaa equals any of the naturally occurring L-amino acids
  SITE (29): Xaa equals any of the naturally occurring L-amino acids
  SITE (70): Xaa equals any of the naturally occurring L-amino acids
  SITE (73): Xaa equals any of the naturally occurring L-amino acids
  SITE (80): Xaa equals any of the naturally occurring L-amino acids
  SITE (97): Xaa equals any of the naturally occurring L-amino acids
  SITE (112): Xaa equals any of the naturally occurring L-amino acids
  SITE (117): Xaa equals any of the naturally occurring L-amino acids
  SITE (122): Xaa equals any of the naturally occurring L-amino acids
MEXPAQLLFLLLLWLPDTTGEIVLTQSPXTLSLSPGERATLSCRASQSVSSYLAWYQQKPGQAPRLLIYXASXRATGIPXRFSGSGSGTDFTLTISXLEPEDFAVYYCQQRXNWPPXYTFGXGTKVEIKRTVAAPSVFIFPPSDEQLKSGTASVVCLLNNFYPREAKVQWKVDNALQSGNSQESVTEQDSKDSTYSLSSTLTLSKADYEKHKVYACEVTHQGLSSPVTKSFNRGEC

SEQ ID NO: 238 - protein, 144 aa, Homo sapiens
MRVPAQLLGLLLLWLSGAKCDTQMTQSPSSLSASVGDTVTITCQASDDISKDLNWFQQKPGTAPKLLIFDASNLETGVPSRFSGSGSGTDFTFTISSLQPEDFATYYCQQYDNPPSLSAEGPKWRSNELWLHHLSSSSRHLMSS

SEQ ID NO: 239 - protein, 50 aa, Homo sapiens
  SITE (4): Xaa equals any of the naturally occurring L-amino acids
  SITE (10): Xaa equals any of the naturally occurring L-amino acids
  SITE (22): Xaa equals any of the naturally occurring L-amino acids
  SITE (35): Xaa equals any of the naturally occurring L-amino acids
  SITE (39): Xaa equals any of the naturally occurring L-amino acids
  SITE (42): Xaa equals any of the naturally occurring L-amino acids
VHAXTPFAGXCFDPVSLYWCYXNPGTHCYPTLRGXEQRXPSXRSHIVLRS

SEQ ID NO: 240 - protein, 64 aa, Homo sapiens
MVSPLISALFHVPFLWLGMFFPHSLSGPFPSHLRRASSSRKPLVKPPRARQYPPLASSGYRGRI

SEQ ID NO: 241 - protein, 26 aa, Homo sapiens
MSFPHASTLPFHKLSDLQHTLPNHQG

SEQ ID NO: 242 - protein, 64 aa, Homo sapiens; identical to SEQ ID NO: 240

SEQ ID NO: 243 - protein, 61 aa, Homo sapiens
  SITE (21): Xaa equals any of the naturally occurring L-amino acids
  SITE (27): Xaa equals any of the naturally occurring L-amino acids
  SITE (31): Xaa equals any of the naturally occurring L-amino acids
FNFKFAHRPSNPLVNLTVSPXRNSSLXTRKXPCRESKKFNTHSRPKSSHQLRKRSSSTPTT

SEQ ID NO: 244 - protein, 56 aa, Homo sapiens
MLIFLKCLTVSYAKYSSKIYTAVSNTFSTASDSWLCVKTPRGYHWFMSLETPDIEQ

SEQ ID NO: 245 - protein, 10 aa, Homo sapiens
VLLFLSLLTS

SEQ ID NO: 246 - protein, 56 aa, Homo sapiens; identical to SEQ ID NO: 244

SEQ ID NO: 247 - protein, 75 aa, Homo sapiens; identical to SEQ ID NO: 120

SEQ ID NO: 248 - protein, 55 aa, Homo sapiens
MIYFALLLASLFFLLKVKSHFGCKNVTTTSARIFLKPLCTPKSIFPLSRYGRMSS

SEQ ID NO: 249 - protein, 55 aa, Homo sapiens; identical to SEQ ID NO: 248

SEQ ID NO: 250 - protein, 85 aa, Homo sapiens
MLHNAFLFVLFALVSGYGNYAATAHDWLYENGQLSRKEADAVLYRALRAEGVARWRAWLMYAGVRLGGAKQYKTPTSSGFSSSGD

SEQ ID NO: 251 - protein, 85 aa, Homo sapiens; identical to SEQ ID NO: 250

SEQ ID NO: 252 - protein, 59 aa, Homo sapiens
MIIANIFMNPLLCAGYLFCFAYTLIHLILLTTSEVCSITAPFFTAVLQSSACPSTHWPE

SEQ ID NO: 253 - protein, 59 aa, Homo sapiens; identical to SEQ ID NO: 252

SEQ ID NO: 254 - protein, 67 aa, Homo sapiens
MLFLIYVSLLMLLFSLCLSLPHLQPPSLREILIPVHSLRFSLVSPLHGSLASSLLLQHCGTLRQVFF

SEQ ID NO: 255 - protein, 67 aa, Homo sapiens; identical to SEQ ID NO: 254

SEQ ID NO: 256 - protein, 86 aa, Homo sapiens
SLKHFWSQGFWIKDTQCATCRMVVARWEERMESYCLMIQCFRLGRWKVLEMCDGYGCATMGRYLVLLNCAHLKMVKMINFVYVLKQ

SEQ ID NO: 257 - protein, 52 aa, Homo sapiens
  SITE (36): Xaa equals any of the naturally occurring L-amino acids
  SITE (37): Xaa equals any of the naturally occurring L-amino acids
MQRLGKAPGTWQAISKCWLLLLLSLPFSQSIIISLXXGTMSYLPLYFPQYFP

SEQ ID NO: 258 - protein, 52 aa, Homo sapiens
MQRLGKAPGTWQAISKCWLLLLLSLPFSQSIIISLRAGTMSYLPLYFPQYFP

SEQ ID NO: 259 - protein, 20 aa, Homo sapiens
MLCVLLAVAFQSSPIPGAAA

SEQ ID NO: 260 - protein, 69 aa, Homo sapiens
MALFRPILLPAPGAWWWPCHHALCPSGCGFPEQPHSRCSSLELQSASRQCWLQWLGDIRPLLLQGREVT

SEQ ID NO: 261 - protein, 51 aa, Homo sapiens
  SITE (34): Xaa equals any of the naturally occurring L-amino acids
MGLIAADVNLDLLVQVVPASCLHCGVTIFPFPHXIHQKPVTKRGQTPGQGN

SEQ ID NO: 262 - protein, 51 aa, Homo sapiens
MGLIAADVNLDLLVQVVPASCLHCGVTIFPFPHFIHQKPVTKRGQTPGQGN

SEQ ID NO: 263 - protein, 13 aa, Homo sapiens
SCISWVFVMINGL

SEQ ID NO: 264 - protein, 61 aa, Homo sapiens
MNASLISWVLVLHRICLGLSDIPKENCIITISGMQLSHHGQSLGKWAEKLHVFYSLFSFLL

SEQ ID NO: 265 - protein, 322 aa, Homo sapiens
  SITE (28): Xaa equals any of the naturally occurring L-amino acids
RAPRRTGPASFSSRPAGTCSDNRVTSFXDLIHDQDEDEEEEEGQRFYAGGSERSGQQIVGPPRKKSPNELVDDLFKGAKEHGAVAVERVTKSPGETSKPRPFAGGGYRLGAAPEEESAYVAGEKRQHSSQDVHVVLKLWKSGFSLDNGELRSYQDPSNAQFLESIRRGEVPAELRRLAHGGQVNLDMEDHRDEDFVKPKGAFKAFTGEGQKLGSTAPQVLSTSSPAQQAENEAKASSSILIDESEPTTNIQIRLADGGRLVQKFNHSHRISDIRLFIVDARPAMAATSFILMTTFPNKELADESQTLKEANLLNAVIVQRLT

SEQ ID NO: 266 - protein, 61 aa, Homo sapiens; identical to SEQ ID NO: 264

SEQ ID NO: 267 - protein, 4 aa, Homo sapiens
PNSP

SEQ ID NO: 268 - protein, 64 aa, Homo sapiens [sequence omitted]

SEQ ID NO: 269 - protein, 64 aa, Homo sapiens [sequence omitted]

SEQ ID NO: 270 - protein, 58 aa, Homo sapiens
MVSLCSGLPSSCLLLGSTAAIIQRQVCLFQGARQWNPVSEFLRAHHHCGNRAGLPAVL

SEQ ID NO: 271 - protein, 58 aa, Homo sapiens; identical to SEQ ID NO: 270

SEQ ID NO: 272 - protein, 122 aa, Homo sapiens
  SITE (19): Xaa equals any of the naturally occurring L-amino acids
  SITE (73): Xaa equals any of the naturally occurring L-amino acids
KAPSSHPGLTCVSLSRLQXSLSLCFPSGPCWAGLLSSLALAGGAPGALPPWQPGQDSKMRTAELVGGSHGPAXGPGEAEPEPTAVVLWTVDPEGGLGQVPAEGPGGLCVPLGPGALVTWTPG

SEQ ID NO: 273 - protein, 130 aa, Homo sapiens
STCCGWGPLGHSRVRGCHCHLGHVGRHQHFVVTNSTVTNIFGQIPFYTSRQLLVCNPTGQREGPVTWLSHCPAPQMVLGLLFSLGPANTTVFTSAHWLSAVVPGSQWHVSPRSSLIPQHTPKGSVANTLN

SEQ ID NO: 274 - protein, 44 aa, Homo sapiens
MRLRNGTVATALAFITSFLTLSWYTTWQNGKGKENDSENVHEMY

SEQ ID NO: 275 - protein, 216 aa, Homo sapiens
  SITE (6): Xaa equals any of the naturally occurring L-amino acids
  SITE (18): Xaa equals any of the naturally occurring L-amino acids
CFPWGXALRQKLFPSALXALVPSGAQPLPATKDTVLAPLRMSQVRSLVIGLQNLLVQKDPLLSQACVGCLEALLDYLDARSPDIALHVASQPWNRFLLFTLLDAGENSFLRPEILRLMTLFMRYRSSSVLSHEEVGDVLQGVALADLSTLSNTTLQALHGFFQQLQSMGHLADHSMAQTLQASLEGLPPSTSSGQPPLQDMLCLGGVAVSLSHIRN

SEQ ID NO: 276 - protein, 122 aa, Homo sapiens
  SITE (92): Xaa equals any of the naturally occurring L-amino acids
  SITE (100): Xaa equals any of the naturally occurring L-amino acids
  SITE (109): Xaa equals any of the naturally occurring L-amino acids
  SITE (116): Xaa equals any of the naturally occurring L-amino acids
MLALTLAKADSPRTALLCSAWLLTASFSAQQHKGSLQVHQTLSVEMDQVLKALSFPKKKAALLSTAILCFLRTALRQSFSSAWNPGALKGPXTAATKDTXLTSLRMSKXGPGHWAXKTSWCK

SEQ ID NO: 277 - protein, 282 aa, Homo sapiens
MLALTLAKADSPRTALLCSAWLLTASFSAQQHKGSLQVHQTLSVEMDQVLKALSFPKKKAALLSAAILCFLRTALRQSFSSALVALVPSGAQPLPATKDTVLAPLRMSQVRSLVIGLQNLLVQKDPLLSQACVGCLEALLDYLDARSPDIALHVASQPWNRFLLFTLLDAGENSFLRPEILRLMTLFMRYRSSSVLSHEEVGDVLQGVALADLSTLSNTTLQALHGFFQQLQSMGHLADHSMAQTLQASLEGLPPSTSSGQPPLQDMLCLGGVAVSLSHIRN

SEQ ID NO: 278 - protein, 39 aa, Homo sapiens
MAFGQEVTHLTKTSWLAPLRFIKGLLGPWGWILLILDLE

SEQ ID NO: 279 - protein, 39 aa, Homo sapiens; identical to SEQ ID NO: 278

SEQ ID NO: 280 - protein, 107 aa, Homo sapiens
GLDVQPVAQGSKLTQEVREGCLAVAGANGFRGGYDGYRPSFSNTPNSGYTQSQFSAPRDYSGYQRDGYQQNFKRGSGQSGPRGAPRGRGGPPRPNRGMPQMNTQQVN

SEQ ID NO: 281 - protein, 77 aa, Homo sapiens
MGTHPKYLEMMELDIGDATQVYVAFLVYLDLMESKSWHEVNCVGLPELQLICLVGTEIEGEGLQTVVPNPHHCFPQP

SEQ ID NO: 282 - protein, 49 aa, Homo sapiens
MGGTCVLLLSSHTQSCLFVSCCHCQLIVETAISFSYSALPSAFWPLQLP

SEQ ID NO: 283 - protein, 50 aa, Homo sapiens
  SITE (43): Xaa equals any of the naturally occurring L-amino acids
  SITE (50): Xaa equals any of the naturally occurring L-amino acids
MNFLVFLSLSSSLVSAAGPRFPSREERGVGGVVLIKSEDMTLXERSKGSX

SEQ ID NO: 284 - protein, 240 aa, Homo sapiens
  SITE (67): Xaa equals any of the naturally occurring L-amino acids
GEGDDKEESVEKLDCHYSGHHPQPASFCTFGSRQIGRGYYVFDSRWNRLRCALNLMVEKHLNAQLWXKIPPVPSTTSPISTRIPHRTNSVPTSQCGVSYLAAATVSTSPVLLSSTCISPNSKSVPAHGTTLNAQPAASGAMDPVCSMQSRQVSSSSSSPSTPSGLSSVPSSPMSRKPQKLKSSKSLRPKESSGNSTNCQNASSSTSGGSGKKRKNSSPLLVHSSSSSSSSSSSSHSMGVF

SEQ ID NO: 285 - protein, 43 aa, Homo sapiens
  SITE (7): Xaa equals any of the naturally occurring L-amino acids
YSMVYMXHIFLIQSIIDGHLGWFQVFAIVNSATVNIRVHVSLW

SEQ ID NO: 286 - protein, 56 aa, Homo sapiens
  SITE (3): Xaa equals any of the naturally occurring L-amino acids
  SITE (4): Xaa equals any of the naturally occurring L-amino acids
  SITE (14): Xaa equals any of the naturally occurring L-amino acids
  SITE (21): Xaa equals any of the naturally occurring L-amino acids
FAXXDGFQLHPCPXKGHELIXFYGCIVFHGVYVPHFLNLVCHCWTFGLVPSLCYCE

SEQ ID NO: 287 - protein, 75 aa, Homo sapiens
MSWLFPATILFEEKICFSLFPRKLVGQHGHYSSCAVTPAPRCLELSVLTFMHDCKASWSIFYGASVCFRPMTFVR

SEQ ID NO: 288 - protein, 75 aa, Homo sapiens; identical to SEQ ID NO: 287

SEQ ID NO: 289 - protein, 83 aa, Homo sapiens [sequence omitted]

SEQ ID NO: 290 - protein, 223 aa, Homo sapiens
  SITE (132): Xaa equals any of the naturally occurring L-amino acids
AWYLLRVQVLQLVAAYLSLPSNNLSHSLWEQLCAQGWQTPEIALIDSHKLLRSIILLLMGSDILSTQKAAVETSFLDYGENLVQKWQVLSEVLSCSEKLVCHLGRLGSVSEAKAFCLEALKLTTKLQIPRQXALFLVLKGELELARNDIDLCQSDLQQVLFLLESCTEFGGVTQHLDSVKKVHLQKGKQQAQVPCPPQLPEEELFLRGPALELVPLWPRSLAP

SEQ ID NO: 291 - protein, 8 aa, Homo sapiens
AWFLVKPE

SEQ ID NO: 292 - protein, 223 aa, Homo sapiens
AWYLLRVQVLQLVAAYLSLPSNNLSHSLWEQLCAQGWQTPEIALIDSHKLLRSIILLLMGSDILSTQKAAVETSFLDYGENLVQKWQVLSEVLSCSEKLVCHLGRLGSVSEAKAFCLEALKLTTKLQIPRQCALFLVLKGELELARNDIDLCQSDLQQVLFLLESCTEFGGVTQHLDSVKKVHLQKGKQQAQVPCPPQLPEEELFLRGPALELVPLWPRSLAP

SEQ ID NO: 293 - protein, 88 aa, Homo sapiens
  SITE (7): Xaa equals any of the naturally occurring L-amino acids
  SITE (30): Xaa equals any of the naturally occurring L-amino acids
  SITE (43): Xaa equals any of the naturally occurring L-amino acids
  SITE (46): Xaa equals any of the naturally occurring L-amino acids
ADPSPSXWLQTHRGPRLLWPHHQQLLLSFXEPRKPLILLLPVXAPXSLKPHSCIPFSLDITPPTPWLNFLPVVAWSFGHCPGLFLSPS

SEQ ID NO: 294 - protein, 80 aa, Homo sapiens
  SITE (61): Xaa equals any of the naturally occurring L-amino acids
  SITE (69): Xaa equals any of the naturally occurring L-amino acids
  SITE (75): Xaa equals any of the naturally occurring L-amino acids
MHHHTRLVFVFLVEMGFHHVGQAGLELLTSSDLPALASQSAGITGVSHCAQLPFLPLKSKXGWELSPWXFMVAKXLNPVA

SEQ ID NO: 295 - protein, 18 aa, Homo sapiens
  SITE (4): Xaa equals any of the naturally occurring L-amino acids
  SITE (14): Xaa equals any of the naturally occurring L-amino acids
MVAXLLILLLDSGXLLAG

SEQ ID NO: 296 - protein, 126 aa, Homo sapiens
ATTSVPKYVFNLNFILMCLRDESKYMLVTSHSNVEVGRWLPGLPSPGRICGEQSDVHPSGLFSINDSLLDLLLLGFRSKRGIVVENALLGEGEPEIHKRRLPCSFAYLAAPRLGVRIPGFPSLLCH

SEQ ID NO: 297 - protein, 26 aa, Homo sapiens
MPVVLFQLWLFILKTDNAFAWLKIRR

SEQ ID NO: 298 - protein, 136 aa, Homo sapiens
  SITE (3): Xaa equals any of the naturally occurring L-amino acids
  SITE (67): Xaa equals any of the naturally occurring L-amino acids
PSXMLLLWASSLPTRCDCSFPVTPLVPLVHVICVWVMFPSAATAACHPGAGAFFSQGPSPFSRTWPXLGHREIPAEGAGETVALGLQPKRHTLAVGVHGMLALSTVTVGGFGGFPWTSGPGCPPLSWTCFIFPILT

SEQ ID NO: 299 - protein, 19 aa, Homo sapiens
QIWPFLPPSQPSGPLQRAV

SEQ ID NO: 300 - protein, 133 aa, Homo sapiens
MLLLWASSLPTRCDCSFPVTPLVPLVHVICVWVMFPSAATAACHPGAGAFFSQGPSPFSRTWPLLGHREIPAEGAGETVALGLQPKRHTLAVGVHGMLALSTVTVGGFGGFPWTSGPGCPPLSWTCFIFPILT

SEQ ID NO: 301 - protein, 11 aa, Homo sapiens
SSLKNQVSVSQ

SEQ ID NO: 302 - protein, 495 aa, Homo sapiens
MKHLWFFLLLVAAPRWVLSQVELQESGPGLVKPSQTLSLTCSVSGVSMSRGDWSWSWVRQVPGKGLEWIGHIDYTGKTDYKSSLKNQVSISQDTAKNQFFLRVESVTAADTAVYFCARLFESSGYGAWLDPWGPGILVTVSSASPTSPKVFPLSLCSTQPDGNVVIACLVQGFFPQEPLSVTWSESGQGVTARNFPPSQDASGDLYTTSSQLTLPATQCLAGKSVTCHVKHYTNPSQDVTVPCPVPSTPPTPSPSTPPTPSPSCCHPRLSLHRPALEDLLLGSEANLTCTLTGLRDASGVTFTWTPSSGKSAVQGPPDRDLCGCYSVSSVLPGCAEPWNHGKTFTCTAAYPESKTPLTATLSKSGNTFRPEVHLLPPPSEELALNELVTLTCLARGFSPKDVLVRWLQGSQELPREKYLTWASRQEPSQGTTTFAVTSILRVAAEDWKKGDTFSCMVGHEALPLAFTQKTIDRLAGKPTHVNVSVVMAEVDGTCY

SEQ ID NO: 303 - protein, 90 aa, Homo sapiens
  SITE (8): Xaa equals any of the naturally occurring L-amino acids
PYECKECXKAFRVHVHLTQHRKIHTDVKPYECKECGKTFSRASYLVQHSRIHTGKKPYECKECGKAFSSGSYLVQHQRIHTGERPYWLTY

SEQ ID NO: 304 - protein, 93 aa, Homo sapiens
  SITE (5): Xaa equals any of the naturally occurring L-amino acids
QRIHXGEKPYECNKCGKAFTVYGQLIGHQSVHTGEKPFECKECGKAFRLNSFLTEHQRVHTGEKPFKCKKCGKTFRYSSALKVHLRKHMSVIP

SEQ ID NO: 305 - protein, 9 aa, Homo sapiens
MWVCSITDQ

SEQ ID NO: 306 - protein, 264 aa, Homo sapiens
  SITE (5): Xaa equals any of the naturally occurring L-amino acids
  SITE (7): Xaa equals any of the naturally occurring L-amino acids
  SITE (13): Xaa equals any of the naturally occurring L-amino acids
  SITE (63): Xaa equals any of the naturally occurring L-amino acids
  SITE (88): Xaa equals any of the naturally occurring L-amino acids
  SITE (170): Xaa equals any of the naturally occurring L-amino acids
  SITE (171): Xaa equals any of the naturally occurring L-amino acids
TWGKXKXPFIESXPGGKIGWGKKGLFFLKVNYWGKKAFNPRGHSKKVTFHQLGLKKNPFWGLXKEVLGKAFSTFSYLVQHQRIHTSEXPYECKECGKAFSTSSPLAKHQRIHTGEKPYECKECGKSFTVYGQLTRHQSIHTGEKPFECKECGKAFRLSSFLHAHQRIHAXXKPYGCKECGKTFSRASYLVQHGRLHTGEKPCECKECGKAFSTGSYLVQHQRIHTGEKPYECKECGKAFISRHQLTVHQRVHTGEKPYKCKEEG

SEQ ID NO: 307 - protein, 9 aa, Homo sapiens
MWVCSITDQ

SEQ ID NO: 308 - protein, 10 aa, Homo sapiens
LTYLAHLLCF

SEQ ID NO: 309 - protein, 10 aa, Homo sapiens
MCSLSSEHLA

SEQ ID NO: 310 - protein, 465 aa, Homo sapiens
  SITE (16): Xaa equals any of the naturally occurring L-amino acids
  SITE (27): Xaa equals any of the naturally occurring L-amino acids
  SITE (44): Xaa equals any of the naturally occurring L-amino acids
NRRNGASQITWCSGQXKSSKWAREIGXYQTGVYQPGWGPQRHAXGEIATRAISMLAILTGNVGINGGNSGAREGSYSLPFVRMPTLENPIQTSISMFMWTDAIERGPEMTALRDGVRGKDKLDVPIKMIWNYAGNCLINQHSEINRTHEILQDDKKCELIVVIDCHMTSSAKYADILLPDCTASEQMDFALDASCGNMSYVIFNDQVIKPRFECKTIYEMTSELAKRLGVEQQFTEGRTQEEWMRHLYAQSREAIPELPTFEEFRKQGIFKKRDPQGHHVAYKAFREDPQANPLTTPSGKIEIYSQALADIAATWELPEGDVIDPLPIYTPGFESYQDPLNKQYPLQLTGFHYKSRVHSTYGNVDVLKAACRQEMWINPLDAQKRGIHNGDKVRIFNDRGEVHIEAKVTPRMMPGVVALGEGAWYDPDAKRVDKGGCINVLTTQRPSPLAKGNPSHTNLVQVEKV

SEQ ID NO: 311 - protein, 185 aa, Homo sapiens
MAQANSTLGAGGWVGNGVYVSGVQREYDAFITNQLRAAQTQSSGLTARYEQMSKIDNMLSTSTSSLATQMQDFFTSLQTLVSNAEDPAARQALIGKSEGLVNQFKTTDQYLRDQDKQVNIAIGASVDQINNYAKQIASLNDQISRLTGVGAGASPNNLLDQRDQLGERIKPDCWCRSQRSGWRHL

SEQ ID NO: 312 - protein, 56 aa, Homo sapiens
MSHCAWPPLLIFITRVQWATATKCQFTAKSGIGLTQGCSSVFVKLGLFLICPYDWE

SEQ ID NO: 313 - protein, 56 aa, Homo sapiens; identical to SEQ ID NO: 312

SEQ ID NO: 314 - protein, 42 aa, Homo sapiens
LPARLLQRSPRRCRRRRVPSPSLAHVGRRVQPCYSRAPPLSS

SEQ ID NO: 315 - protein, 146 aa, Homo sapiens
  SITE (7): Xaa equals any of the naturally occurring L-amino acids
MAALLLXPLLLLLPLLLLKLHLWPQLRWLPAATAARGALEKASGQRREPEMQRPEAARSLPEGTVPPEVEEPPPLCHLEQLWRCSSPLAQSFCGSGSGWPRPACALPLCPPPCAGAPCCTASAAAARARWCWRQSFWSPWSRTCPP

SEQ ID NO: 316 - protein, 174 aa, Homo sapiens
  SITE (151): Xaa equals any of the naturally occurring L-amino acids
  SITE (161): Xaa equals any of the naturally occurring L-amino acids
  SITE (164): Xaa equals any of the naturally occurring L-amino acids
MAALLLLPLLLLLPLLLLKLHLWPQLRWLPADLAFAVRALCCKRALRARALAAAAADPEGPEGGCSLAWRLAELAQQRAAHTFLIHGSRRFSYSEAERESNRAARAFLRALGWDWGPDGGDSGEGSAGEGERAAPGAGDASGRKRRGVCRXGTVPPEGGRXPPXPFVTLEANCG

SEQ ID NO: 317 - protein, 119 aa, Homo sapiens
  SITE (14): Xaa equals any of the naturally occurring L-amino acids
  SITE (78): Xaa equals any of the naturally occurring L-amino acids
QWGGGQLMELVPLXCAFPGVGSWGWEQGKAASSLGFLLCLPRVAANPVPAGGAGMASCPGLWQETLFPLPVGLPRLSXPFSHKKIWGQARWLTPVIPALWEAEAGSHKVRRSGPSWLIR

SEQ ID NO: 318 - protein, 234 aa, Homo sapiens
MAALLLLPLLLLLPLLLLKLHLWPQLRWLPADLAFAVRALCCKRALRARALAAAAADPEGPEGGCSLAWRLAELAQQRAAHTFLIHGSRRFSYSEAERESNRAARAFLRALGWDWGPDGGDSGEGSAGEGERAAPGAGDAAAGSGAEFAGGDGAARGGGAAALCHLEQLWRCSSPLAQSFCGSGSGWPRPACALPLCPPPCAGAPCCTASAAAARARWCWRQSFWSPWSRTCPP

SEQ ID NO: 319 - protein, 683 aa, Homo sapiens
MAALLLLPLLLLLPLLLLKLHLWPQLRWLPADLAFAVRALCCKRALRARALAAAAADPEGPEGGCSLAWRLAELAQQRAAHTFLIHGSRRFSYSEAERESNRAARAFLRALGWDWGPDGGDSGEGSAGEGERAAPGAGDAAAGSGAEFAGGDGAARGGGAAAPLSPGATVALLLPAGPEFLWLWFGLAKAGLRTAFVPTALRRGPLLHCLRSCGARALVLAPEFLESLEPDLPALRAMGLHLWAAGPGTHPAGISDLLAEVSAEVDGPVPGYLSSPQSITDTCLYIFTSGTTGLPKAARISHLKILQCQGFYQLCGVHQEDVIYLALPLYHMSGSLLGIVGCMGIGATVVLKSKFSAGQFWEDCQQHRVTVFQYIGELCRYLVNQPPSKAERGHKVRLAVGSGLRPDTWERFVRRFGPLQVLETYGLTEGNVATINYTGQRGAVGRASWLYKHIFPFSLIRYDVTTGEPIRDPQGHCMATSPGEPGLLVAPVSQQSPFLGYAGGPELAQGKLLKDVFRPGDVFFNTGDLLVCDDQGFLRFHDRTGDTFRWKGENVATTEVAEVFEALDFLQEVNVYGVTVPGHEGRAGMAALVLRPPHALDLMQLYTHVSENLPPYARPRFLRLQESLATTETFKQQKVRMANEGFDPSTLSDPLYVLDQAVGAYLPLTTARYSALLAGNLRI

SEQ ID NO: 320 - protein, 162 aa, Homo sapiens
  SITE (157): Xaa equals any of the naturally occurring L-amino acids
MGPRFTMLLAMWLVCGSEPHPHATIRGSHGGRKVPLVSPDSSRPARFLRHTGRSRGIERSTLEEPNLQPLQRRRSVPVLRLARPTEPPARSDINGAAVRPEQRPAARGSPREMIRDEGSSARSRMLRFPSGSSSPNILASFAGKNRVWVISSPHASXGYYRL

SEQ ID NO: 321 - protein, 509 aa, Homo sapiens
MTWRMGPRFTMLLAMWLVCGSEPHPHATIRGSHGGRKVPLVSPDSSRPARFLRHTGRSRGIERSTLEEPNLQPLQRRRSVPVLRLARPTEPPARSDINGAAVRPEQRPAARGSPREMIRDEGSSARSRMLRFPSGSSSPNILASFAGKNRVWVISAPHASEGYYRLMMSLLKDDVYCELAERHIQQIVLFHQAGEEGGKVRRITSEGQILEQPLDPSLIPKLMSFLKLEKGKFGMVLLKKTLQVEERYPYPVRLEAMYEVIDQGPIRRIEKIRQKGFVQKCKASGVEGQVVAEGNDGGGGAGRPSLGSEKKKEDPRRAQVPPTRESRVKVLRKLAATAPAFPQPPSTPRATTLPPAPATTVTRSTSRAVTVAARPMTTTAFPTTQRPWTPSPSHRPPTTTEVITARRPSVSENLYPPSRKDQHRERPQTTRRPSKATSLESFTNAPPTTISEPSTRAAGPGRFRDNRMDRREHGHRDPNVVPGPPKPAKEKPPKKKAQDKILSNEYEEV

SEQ ID NO: 322 - protein, 68 aa, Homo sapiens
  SITE (5): Xaa equals any of the naturally occurring L-amino acids
PPHLXSFEFLKNVQLRPDTVAHTCDPGTLGGRGWWITGSGDRDILANTVKRRLYRKCRRLAGHGGGRL

SEQ ID NO: 323 - protein, 58 aa, Homo sapiens
MPNQFWKLHILLFLLFFLFPLVQLCIFILISNKEKKNVCTLRKTYIVRHFLWLRSFQV

SEQ ID NO: 324 - protein, 58 aa, Homo sapiens
MQVFSALLYSLMHFYLPSFTLEMYLNTLLSHDLLSFFHCSGLVFFVYFKSVTGLFSGV

SEQ ID NO: 325 - protein, 1 aa, Homo sapiens
I

SEQ ID NO: 326 - protein, 7 aa, Homo sapiens
IFTCVLY

SEQ ID NO: 327 - protein, 41 aa, Homo sapiens
  SITE (16): Xaa equals any of the naturally occurring L-amino acids
QTVSAFLPPLFYVTFXLGKINYTKYHIIPSYKLLPENKSCV

SEQ ID NO: 328 - protein, 58 aa, Homo sapiens; identical to SEQ ID NO: 324

SEQ ID NO: 329 - protein, 14 aa, Homo sapiens
  SITE (7): Xaa equals any of the naturally occurring L-amino acids
MMPAYPXLLAWILF

SEQ ID NO: 330 - protein, 32 aa, Homo sapiens
AWSHLSILLNYKLQRQEWHLFTYFEFVCNCLD

SEQ ID NO: 331 - protein, 188 aa, Homo sapiens [sequence omitted]

SEQ ID NO: 332 - protein, 188 aa, Homo sapiens [sequence omitted]

SEQ ID NO: 333 - protein, 44 aa, Homo sapiens [sequence omitted]

SEQ ID NO: 334 - protein, 44 aa, Homo sapiens [sequence omitted]

SEQ ID NO: 335 - protein, 249 aa, Homo sapiens
  SITE (147): Xaa equals any of the naturally occurring L-amino acids
  SITE (150): Xaa equals any of the naturally occurring L-amino acids
  SITE (196): Xaa equals any of the naturally occurring L-amino acids
  SITE (222): Xaa equals any of the naturally occurring L-amino acids
MVCVFMCIVGVCVACCACVYCGCLLSRAVERTSGKQPQHQGQARSAECMEAGQVGAWDEGSTEMQGCQGPWNQEPMIKATVHTALEAKDIFISQGLKSMGQGWAPGQDWGYRVDQSPSLPPGAYPHPFTSQVSPPQPLGELLLIPQXVAXVTLLPEASPHPLKHPLPAAHLQHSQRAPWPVSTGLSLLGGAGAEQXPGLGVPAPRSTPSPTASLFNLRQAVXLLSLTFPLCKMREGTAPSKPSFSLKPL

SEQ ID NO: 336 - protein, 42 aa, Homo sapiens
MKIVTTLYCLFVFLLNCFGVGGSCIFLSNRTPGFSWAHDCPQ

SEQ ID NO: 337 - protein, 42 aa, Homo sapiens; identical to SEQ ID NO: 336

SEQ ID NO: 338 - protein, 42 aa, Homo sapiens; identical to SEQ ID NO: 336

SEQ ID NO: 339 - protein, 82 aa, Homo sapiens [sequence omitted]

SEQ ID NO: 340 - protein, 265 aa, Homo sapiens
  SITE (112): Xaa equals any of the naturally occurring L-amino acids
  SITE (113): Xaa equals any of the naturally occurring L-amino acids
  SITE (193): Xaa equals any of the naturally occurring L-amino acids
  SITE (222): Xaa equals any of the naturally occurring L-amino acids
  SITE (238): Xaa equals any of the naturally occurring L-amino acids
  SITE (258): Xaa equals any of the naturally occurring L-amino acids
MDLLQFLAFLFVLLLSGMGATGTLRTSLDPSLEIYKKMFEVKRREQLLALKNLAQLNDIHQQYKILDVMLKGLFKVLEDSRTVLTAADVLPDGPFPQDEKLKDAFSHVVENXXFFGDVVLRFPKIVHYYFDHNSNWNLLIRWGISFCNQTGVFNQGPHSPILSLMAQELGISEKDSNFQNPFKIDRTEFIPSXDPFQKALREEEKRRKKEEKRKEIRKGPKXLPDSHLELLGPWSSFXVQGATRRQVREGRRGWSFGXWLEEAPF

SEQ ID NO: 341 - protein, 229 aa, Homo sapiens
MDLLQFLAFLFVLLLSGMGATGTLRTSLDPSLEIYKKMFEVKRREQLLALKNLAQLNDIHQQYKILDVMLKGLFKVLEDSRTVLTAADVLPDGPCPQDEKLKDAFSHVVENTAFFGDVVLRFPRIVHYYFDHNSNWNLLIRWGISFCNQTGVFNQGPHSPILSLMAQELGISEKDSNFQNPFKIDRTEFIPSTDPFQKALREEEKRRKKEEKRKEIRKGPRISRSQSEL

SEQ ID NO: 342 - protein, 88 aa, Homo sapiens
  SITE (1): Xaa equals any of the naturally occurring L-amino acids
  SITE (2): Xaa equals any of the naturally occurring L-amino acids
  SITE (19): Xaa equals any of the naturally occurring L-amino acids
XXEDRLPGPILPRGFQLWXSLGGEFPRLQIRPMCHAPNCLSVRPSVRPSVHPSIHPSIPVTISTPMCQMPYISNLMQVPPPPCPLLIQ

SEQ ID NO: 343 - protein, 162 aa, Homo sapiens
  SITE (138): Xaa equals any of the naturally occurring L-amino acids
  SITE (152): Xaa equals any of the naturally occurring L-amino acids
MRPRGLPPLLVVLLGCWASVSAQTDATPAVTTEGLNSTEAALATFGTFPSTRPPGTPRAPGPSSGPRPTPVTDVAVLCVCDLSPAQCDINCCCDPDCSSVDFSVFSACSVPVVTGDSQFCSQKAVIYSLNFTANPPQXVFELVDQINPSIFXIHITNCRCSV

SEQ ID NO: 344 - protein, 274 aa, Homo sapiens
  SITE (56): Xaa equals any of the naturally occurring L-amino acids
PFYSSPEILRVPDSRKKVPITVQSIVIQSLNKTLTRREDTDVLQPTLVNAGHFSLXVNVVLEVKYSLTYTDAGEVTKADLSFVLGTVSSVVVPLQQKFEIHFLQENTQPVPLSGNPGYVVGLPLAAGFQPHKGGALPCQLVAQKVKSLLWGQGFPDYVAPFGNSQAQDMLDWVPIHFITQSFNRKDSCQLPGALVIEVKWTKYGSLLNPQAKIVNVTANLISSSFPEANSGNERTILISTAVTFVDVSAPAEAGFRAPPAINARLPFNFFFPFV

SEQ ID NO: 345 - protein, 254 aa, Homo sapiens
  SITE (5): Xaa equals any of the naturally occurring L-amino acids
  SITE (15): Xaa equals any of the naturally occurring L-amino acids
  SITE (17): Xaa equals any of the naturally occurring L-amino acids
  SITE (24): Xaa equals any of the naturally occurring L-amino acids
THLFXCNSYYKPLTXHXPFIIQKXPDENNFDTLMKTSDGFTLNAESYVSFTTKLDIPTAAKYEYGVPLQTSDSFLRFPSSLTSSLCTDNNPAAFLVNQAVKCTRKINLEQCEEIEALSMAFYSSPEILRVPDSRKKVPITVQSIVIQSLNKTLTRREDTDVLQPTLVNAGHFSLCVNVVLEDSCQLPGALVIEVKWTKYGSLLNPQAKIVNVTANLISSSFPENAQMHQFLNIHVKFENCTFGEIKFYIQLAKK

SEQ ID NO: 346 - protein, 587 aa, Homo sapiens
MRPRGLPPLLVVLLGCWASVSAQTDATPAVTTEGLNSTEAALATFGTFPSTRPPGTPRAPGPSSGPRPTPVTDVAVLCVCDLSPAQCDINCCCDPDCSSVDFSVFSACSVPVVTGDSQFCSQKAVIYSLNFTANPPQRVFELVDQINPSIFCIHITNYKPALSFINPEVPDENNFDTLMKTSDGFTLNAESYVSFTTKLDIPTAAKYEYGVPLQTSDSFLRFPSSLTSSLCTDNNPAAFLVNQAVKCTRKINLEQCEEIEALSMAFYSSPEILRVPDSRKKVPITVQSIVIQSLNKTLTRREDTDVLQPTLVNAGHFSLCVNVVLEVKYSLTYTDAGEVTKADLSFVLGTVSSVVVPLQQKFEIHFLQENTQPVPLSGNPGYVVGLPLAAGFQPHKGSGIIQTTNRYGQLTILHSTTEQDCLALEGVRTPVLFGYTMQSGCKLRLTGALPCQLVAQKVKSLLWGQGFPDYVAPFGNSQAQDMLDWVPIHFITQSFNRKDSCQLPGALVIEVKWTKYGSLLNPQAKIVNVTANLISSSFPEANSGNERTILISTAVTFVDVSAPAEAGFRAPPAINARLPFNFFFPFV

SEQ ID NO: 347 - protein, 184 aa, Homo sapiens
MKALGAVLLALLLCGRPGRGQTQQEEEEEDEDHGPDDYDEEDEDEVEEEETNRLPGGRSRVLLRCYTCKSLPRDERCNLTQNCSHGQTCTTLIAHGNTESGLLTTHSTWCTDSCQPITKTVEGTQVTMTCCQSSLCNVPPWQSSRVQDPTGKGAGGPRGSSETVGAALLLNLLAGLGAMGARRP

SEQ ID NO: 348 - protein, 108 aa, Homo sapiens
  SITE (19): Xaa equals any of the naturally occurring L-amino acids
  SITE (21): Xaa equals any of the naturally occurring L-amino acids
  SITE (29): Xaa equals any of the naturally occurring L-amino acids
  SITE (87): Xaa equals any of the naturally occurring L-amino acids
MFSLSWQLSLVTFMGFPIXMXVSNIYGKXYKRLSKEVQNALARASNTAEETISAMKTVRSFANEEEEAEVYLRKLQQVYKLNRKEAXAYMYYVWGSGLTLLVVQVSIL

SEQ ID NO: 349 - protein, 219 aa, Homo sapiens
VTILCIDLGTDMVPAISLAYEQAESDIMKRQPRNPKTDKLVNERLISMAYGQIGMIQALGGFFTYFVILAENGFLPIHLLGLRVDWDDRWINDVEDSYGQQWTYEQRKIVEFTCHTAFFVSIVVVQWADLVICKTRRNSVFQQGMKNKILIFGLFEETALAAFLSYCPGMGVALRMYPLKPTWWFCAFPYSLLIFVYDEVRKLIIRRRPGGWVEKETYY

SEQ ID NO: 350 - protein, 73 aa, Homo sapiens
FSSSMSLSFLPFLPFLSPCSETAAGSYLSRPTPFPMVAVLSAGAGSCRWRIREKSTEQLPAERAGPGEPSGGS

SEQ ID NO: 351 - protein, 296 aa, Homo sapiens
MFSLSWQLSLVTFMGFPIIMMVSNIYGKYYKRLSKEVQNALARASNTAEETISAMKTVRSFANEEEEAEVYLRKLQQVYKLNRKEAAAYMYYVWGSGLTLLVVQVSILYYGGHLVISGQMTSGNLIAFIIYEFVLGDCMENVSFSLSPGKVTALVGPSGSGKSSCVNILENFYPLEGGRVLLDGKPISAYDHKYLHRVISLVSQEPVLFARSITDNISYGLPTVPFEMVVEAAQKANAHGFIMELQDGYSTETGEKGAQLSGGQKQRVAWPGLWCGTPQSSSWMKPPALWMPRASI

SEQ ID NO: 352 - protein, 446 aa, Homo sapiens
MFSLSWQLSLVTFMGFPIIMMVSNIYGKYYKRLSKEVQNALARASNTAEETISAMKTVRSFANEEEEAEVYLRKLQQVYKLNRKEAAAYMYYVWGSGLTLLVVQVSILYYGGHLVISGQMTSGNLIAFIIYEFVLGDCMESVGSVYSGLMQGVGAAEKVFEFIDRQPTMVHDGSLAPDHLEGRVDFENVTFTYRTRPHTQVLQNVSFSLSPGKVTALVGPSGSGKSSCVNILENFYPLEGGRVLLDGKPISAYDHKYLHRVISLVSQEPVLFARSITDNISYGLPTVPFEMVVEAAQKANAHGFIMELQDGYSTETGEKGAQLSGGQKQRVAMARALVRNPPVLILDEATSALDAESEYLIQQAIHGNLQKHTVLIIAHRLSTVEHAHLIVVLDKGRVVQQGTHQQLLAQGGLYAKLVQRQMLGLQPAADFTAGHNEPVANGSHKA

SEQ ID NO: 353 - protein, 35 aa, Homo sapiens
KFKQVIKSFYKIHLAKEILSMNIKLRKVLYVFLVN

SEQ ID NO: 354 - protein, 27 aa, Homo sapiens
MAIFCFSLCSLGSILGKGMSTFGSISV

SEQ ID NO: 355 - protein, 99 aa, Homo sapiens [sequence omitted]

SEQ ID NO: 356 - protein, 99 aa, Homo sapiens [sequence omitted]

SEQ ID NO: 357 - protein, 99 aa, Homo sapiens
  SITE (75): Xaa equals any of the naturally occurring L-amino acids
MGRVSIQQLGVLVALPVPLLLLGCGSALHPGAPRSIPHTMPSTREVGQTRPGPCQPSVPRFSHWLHRMVAFSLPXSQSCSEGAWRSTLSHQGQLETKAI

SEQ ID NO: 358 - protein, 67 aa, Homo sapiens
PIPWLCPPSPTLPLLSIFFLPTHPPPPSRRGGLGRPRPSLEKPSLSSAVVPPPNPITAAHPILTVIL

SEQ ID NO: 359 - protein, 4 aa, Homo sapiens
APRG

SEQ ID NO: 360 - protein, 71 aa, Homo sapiens
MQNRSPAFCFLLMYLLCTCVTRVLLSIIFNLIRAYLWSWHDVTPCVRVGITPVYLFLSSAAHNARHIVGTL

SEQ ID NO: 361 - protein, 71 aa, Homo sapiens; identical to SEQ ID NO: 360

SEQ ID NO: 362 - protein, 51 aa, Homo sapiens [sequence omitted]

SEQ ID NO: 363 - protein, 51 aa, Homo sapiens [sequence omitted]

SEQ ID NO: 364 - protein, 53 aa, Homo sapiens
  SITE (41): Xaa equals any of the naturally occurring L-amino acids
SCFLALKSILAVCGGSHLPPALWEASGGGLVPNSCSPGDPXVLERPPPRWSSS

SEQ ID NO: 365 - protein, 110 aa, Homo sapiens
  SITE (97): Xaa equals any of the naturally occurring L-amino acids
MDNRFATAFVIACVLSLISTIYMAASIGTDFWYEYRSPVQENSSDLNKSIWDEFISDEADEKTYNDALFRYNGTVGLWRRCITIPKNMHWYSPPERXESFDVVTKCVSSH

SEQ ID NO: 366 - protein, 165 aa, Homo sapiens
  SITE (2): Xaa equals any of the naturally occurring L-amino acids
  SITE (4): Xaa equals any of the naturally occurring L-amino acids
  SITE (5): Xaa equals any of the naturally occurring L-amino acids
  SITE (148): Xaa equals any of the naturally occurring L-amino acids
RXTXXHFARTYPGIHLRIGSDWKNACAMLKDGTAGSHFMASPQCVGYSRSTAAPLTMTMCLPDLKEIQRAVKLWVRSLDAQSVYVATDSESYVPELQQLFKGKVKVVSLKPEVAQVDLYILGQADHFIGNCVSSFTAFVKRERDLQGXPSSFFGMDRPPKLRDEF

SEQ ID NO: 367 - protein, 177 aa, Homo sapiens
LVLWTRFYRGDMSLHSSPTLPTSLYQSCDLSVGGPSLLTWVWRRERRCCKVFSVSHCLEAGPAKAWAHSCTGSPRGRTGWGSRACEALGKGMGLWGRGGMGFRSICTIRKVLRSFFLEGTLSSLSLFLDLGLELRMGRCAQGGTHQSTREGGYLGVSQGLCQCLQPTSRSLEFGEWG

SEQ ID NO: 368 - protein, 184 aa, Homo sapiens
MDNRFATAFVIACVLSLISTIYMAASIGTDFWYEYRSPVQENSSDLNKSIWDEFISDEADEKTYNDALFRYNGTVGLWRRCITIPKNMHWYSPPERTESFDVVTKCVSFTLTEQFMEKFVDPGNHNSGIDLLRTYLWRCQFLLPFVSLGLMCFGALIGLCACICRSLYPTIATGILHLLADTML

SEQ ID NO: 369 - protein, 211 aa, Homo sapiens
  SITE (64): Xaa equals any of the naturally occurring L-amino acids
  SITE (113): Xaa equals any of the naturally occurring L-amino acids
STHASGRTCALPAAATPRRVGAAAPGCAQGRATDGARRAELRREPAVVAHRHGHAGAHQGGAQXAAQPHRRLQVPQAQAGAHLAPGRESEDPQESEHGAGVHGEPAARAGGAXQAESPQPRQQRLPAAAPAPGARVLSPRAGRMRGHPPQGAGSRGGVVGAPDLERVRPWGPPLPECAQELREGAAPGDSPPPRVPRTRQAGPPAPGGASA

SEQ ID NO: 370 - protein, 225 aa, Homo sapiens
  SITE (11): Xaa equals any of the naturally occurring L-amino acids
  SITE (112): Xaa equals any of the naturally occurring L-amino acids
  SITE (166): Xaa equals any of the naturally occurring L-amino acids
RPDLERVRPWXPPLPECAQELREGAAPGIPPRGCPGLGRGAPDSTSWTPCSRGGERMTPPPSRCLFPPRGRPVLHKPARLGCPFVHRAGKGAPRGRSSKPCLSFTFTFFFFXFGREKNRVFDSALFMFLLGNKRWLCVCVFSCVGFLKKWEEEKKILRPFPRSRSXLRFFRPVPPPFFVLFCFVLLRVHIPVCNPWFARFSVFSKVSLRQKPRAEFLGLEGQNFP

SEQ ID NO: 371 - protein, 68 aa, Homo sapiens [sequence omitted]

SEQ ID NO: 372 - protein, 62 aa, Homo sapiens
VIPFYIHYFVYFNCFILVTLPFKIFKLPIVRCQWEWTPDGQIYKWQWLDQTRTLEDGRVGAK

SEQ ID NO: 373 - protein, 29 aa, Homo sapiens
  SITE (11): Xaa equals any of the naturally occurring L-amino acids
  SITE (13): Xaa equals any of the naturally occurring L-amino acids
IPLWFISVSFXMXRFTILNQYHVTCRCQN

SEQ ID NO: 374 - protein, 68 aa, Homo sapiens [sequence omitted]

SEQ ID NO: 375 - protein, 57 aa, Homo sapiens
  SITE (42): Xaa equals any of the naturally occurring L-amino acids
  SITE (44): Xaa equals any of the naturally occurring L-amino acids
LLSAMLPGENEIVAWINESVCVARSGLALDVDGAPALSPQLXSXKISNLEENGRTVE

SEQ ID NO: 376 - protein, 43 aa, Homo sapiens [sequence omitted]

SEQ ID NO: 377 - protein, 24 aa, Homo sapiens
SACFCCAASSLFSSFSIVSPLWKK

SEQ ID NO: 378 - protein, 477 aa, Homo sapiens
  SITE (49): Xaa equals any of the naturally occurring L-amino acids
  SITE (57): Xaa equals any of the naturally occurring L-amino acids
  SITE (105): Xaa equals any of the naturally occurring L-amino acids
  SITE (109): Xaa equals any of the naturally occurring L-amino acids
  SITE (152): Xaa equals any of the naturally occurring L-amino acids
  SITE (194): Xaa equals any of the naturally occurring L-amino acids
  SITE (197): Xaa equals any of the naturally occurring L-amino acids
  SITE (198): Xaa equals any of the naturally occurring L-amino acids
  SITE (203): Xaa equals any of the naturally occurring L-amino acids
  SITE (459): Xaa equals any of the naturally occurring L-amino acids
  SITE (463): Xaa equals any of the naturally occurring L-amino acids
  SITE (468): Xaa equals any of the naturally occurring L-amino acids
MVNACWCGLLAALSLLLDASTDEAATENILKAELTMAALCGKLGLVTSXNAFITAIXKGSLPPHYALTVLNTTTAATLSNKSYSVQGQSVMMISPSSESHQQVVXVGQXLAVQPQGTVMLTSKNIQCMRTLLNLAHCHGAVLGTSWQLVLAXLQHLVWILGLKPSSGGALKPGRAVEGPSTVLTTAVMTDLPVXSNXXSRLFXSSQYLDDVSLHHLINALCSLSLEAMDMAYGNNKEPSLFAVAKLLETGLVNMHRIEILWRPLTGHLLEVCQHPNSRMREWGAEALTSLIKAGLTFNHDPPLSQNQRLQLLLLNPLKEMSNINHPDIRLKQLECVLQILQSQGDSLGPGWPLVLGVMGAIRNDQGESLIRTAFQCLQLVVTDFLPTMPCTCLQIVVDVAGSFGLHNQELNISLTSIGLLWNISDYFFQRGETIEKELNKEEAAQQKQAEEKGVGLNRXFHPXPAFDXWGYALCKIG

SEQ ID NO: 379 - protein, 29 aa, Homo sapiens
NSQYFTTNIALMFLFKKKKVYGCLHLSTV

SEQ ID NO: 380 - protein, 70 aa, Homo sapiens [sequence omitted]

SEQ ID NO: 381 - protein, 67 aa, Homo sapiens [sequence omitted]

SEQ ID NO: 382 - protein, 79 aa, Homo sapiens
  SITE (23): Xaa equals any of the naturally occurring L-amino acids
  SITE (45): Xaa equals any of the naturally occurring L-amino acids
MGCCSKKYWQLLLGAAPWGVIPXLLLWMGTRAPHFKDSVSQGLPXKAEESRANFNQFLVLLMPKEMIVLTIVHPIVRRA

SEQ ID NO: 383 - protein, 39 aa, Homo sapiens
MFLVSPSVSSVVSSLLSIFWLMHLGQVWLGSMETHPITS

SEQ ID NO: 384 - protein, 39 aa, Homo sapiens; identical to SEQ ID NO: 383

SEQ ID NO: 385 - protein, 39 aa, Homo sapiens; identical to SEQ ID NO: 383

SEQ ID NO: 386 - protein, 198 aa, Homo sapiens
  SITE (9): Xaa equals any of the naturally occurring L-amino acids
  SITE (12): Xaa equals any of the naturally occurring L-amino acids
  SITE (97): Xaa equals any of the naturally occurring L-amino acids
  SITE (164): Xaa equals any of the naturally occurring L-amino acids
  SITE (196): Xaa equals any of the naturally occurring L-amino acids
PDPNARRGXNAXSTRTDHEHRTYRLYRRPSRFRDSPAQRPYPAAGYVETVARAHEAAGFDRALVAFHSNSPDSTLIAAHAASVTQKLQFLIAHRPGXAQPTLAARQFATLDVFNGGRTAVHIITGGDDRELRADGSHIGKDERYARTDEYLSVVRQEWTHEQPXDFKGTYYQVEGAHSTVKSPQQPHIPLYFGGSXRG

SEQ ID NO: 387 - protein, 34 aa, Homo sapiens
ELGRLRHPTQGKPACHIECTALIKFTHDNSAFYN

SEQ ID NO: 388 - protein, 207 aa, Homo sapiens
  SITE (105): Xaa equals any of the naturally occurring L-amino acids
  SITE (110): Xaa equals any of the naturally occurring L-amino acids
  SITE (111): Xaa equals any of the naturally occurring L-amino acids
  SITE (116): Xaa equals any of the naturally occurring L-amino acids
  SITE (129): Xaa equals any of the naturally occurring L-amino acids
  SITE (133): Xaa equals any of the naturally occurring L-amino acids
MRPWRFGWPRTLASQLSLIFLISLVCAHGLSFSAQFYERYISARTVMLGNLENDVSTSVAILDRLPANERAIGWRVLRPAELPVLLNAGEAGEPMTSNDVPMAAXFDCGXXGRALXPDLSRYSRHPETXPGAXDPGRWQPDHPRRTPRRPARSLLVAGGAGAATGAAARLHLGRGAPGRAPADTPGPCGRNPRPERSPHTPGRNRPE

SEQ ID NO: 389 - protein, 18 aa, Homo sapiens
  SITE (15): Xaa equals any of the naturally occurring L-amino acids
  SITE (17): Xaa equals any of the naturally occurring L-amino acids
GWPRWRRERCANTPXVXL

SEQ ID NO: 390 - protein, 435 aa, Homo sapiens
MRPWRFGWPRTLASQLSLIFLISLVCAHGLSFSAQFYERYISARTVMLGNLENDVSTSVAILDRLPANERASWLARLDRQNYRYLLNAGEAGEPMTSNDVPMAATSIADALGEHYALTFRDIPGIQKHFQVHLTLADGNPITLDVRPAALPVAYWLPVVLVLQLALLLGCTWVAVRLAVRPLTRLARAVETLDPNAHPTPLDETGPSEVAHAAAAFNAMQQRIAEYLKERMQILAAISHDLQTPITRMKLRAEFMDDSADREKLWSDLSEMEHLVREGVAYARSVHGATEASHRIDLDAFLDSLVFDYQDMQKQVSLRGKSALILDTRPHALRRVLVNLVDNALKFAGNAELEVGSTANGQLSIKVLDQGPGIAEDELAQVLQPFYRVESSRNRGTGGTGLGLAIAQQLAVAIGGTLTLSNRVEGGLCAEIRLSL

SEQ ID NO: 391 - protein, 34 aa, Homo sapiens
CKWVQNGGHPNVESSKYHCHEPKASLYTLEESTL

SEQ ID NO: 392 - protein, 28 aa, Homo sapiens
LLLCKFKKVNYFLKVLISNFSIWAYDHH

SEQ ID NO: 393 - protein, 36 aa, Homo sapiens
MAGHPTLILLCKWAFHLTGAICEPYLNQTLPTQACL

SEQ ID NO: 394 - protein, 36 aa, Homo sapiens; identical to SEQ ID NO: 393

SEQ ID NO: 395 - protein, 41 aa, Homo sapiens
  SITE (15): Xaa equals any of the naturally occurring L-amino acids
MWLMLILSLTSGETXALRGCCSSSWTYGESAAGPADQAPCL

SEQ ID NO: 396 - protein, 41 aa, Homo sapiens
MWLMLILSLTSGETEALRGCCSSSWTYGESAAGPADQAPCL

SEQ ID NO: 397 - protein, 20 aa, Homo sapiens
IFALSLSFYTCIHIHTHRHT

SEQ ID NO: 398 - protein, 117 aa, Homo sapiens [sequence omitted]

SEQ ID NO: 399 - protein, 183 aa, Homo sapiens [sequence omitted]

SEQ ID NO: 400 - protein, 38 aa, Homo sapiens
MVSKHSLNLHFFYWKGGCACFTSEPRVFVVVELSLLDC

SEQ ID NO: 401 - protein, 38 aa, Homo sapiens; identical to SEQ ID NO: 400

SEQ ID NO: 402 - protein, 92 aa, Homo sapiens
  SITE (10): Xaa equals any of the naturally occurring L-amino acids
  SITE (49): Xaa equals any of the naturally occurring L-amino acids
IGPLLVYVSXTHESLKLWQLKETLIQSFPALVRSLGPGLLFGPPIATGXTQAGDMADKSQAGPRGSVSSVAWGPFPGGSGALAFCPLILRSH

SEQ ID NO: 403 - protein, 24 aa, Homo sapiens
MHIFTILYPISEGFFKIFNFIVFF

SEQ ID NO: 404 - protein, 69 aa, Homo sapiens
  SITE (1): Xaa equals any of the naturally occurring L-amino acids
XSGDLPTSAFPKCWDYRPEPPCPAQAQTSVLCVTSWSRLTVSTLTSTSQAEGVRALPIWPSSQVCSIQP

SEQ ID NO: 405 - protein, 110 aa, Homo sapiens [sequence omitted]

SEQ ID NO: 406 - protein, 79 aa, Homo sapiens
  SITE (67): Xaa equals any of the naturally occurring L-amino acids
MVFFQIQSLLSFLASSLSIIFLLPRCLIPPANGTAGSSCSEFQTLHTFHPQASCAHAGPSNLYTFLXLFDLSAKVSPLM

SEQ ID NO: 407 - protein, 79 aa, Homo sapiens
MVFFQIQSLLSFLASSLSIIFLLPRCLIPPANGTAGSSCSEFQTLHTFHPQASCAHAGPSNLYTFLRLFDLSAKVSPLM

SEQ ID NO: 408 - protein, 325 aa, Homo sapiens
  SITE (10): Xaa equals any of the naturally occurring L-amino acids
  SITE (136): Xaa equals any of the naturally occurring L-amino acids
  SITE (186): Xaa equals any of the naturally occurring L-amino acids
  SITE (234): Xaa equals any of the naturally occurring L-amino acids
VPPAVCPAGXFCQNQCFTKRQYPETKIIKTDGKGWGLVAKRDIRKGEFVNEYVGELIDEEECMARIKHAHENDITHFYMLTIDKDRIIDAGPKGNYSRFMNHSCQPNCETLKWTVNGDTRVGLFAVCDIPAGTELXFNYNLDCLGNEKTVCRCGASNCSGFLGDRPKTSTTLSSEEKGKKTKKKTXRRRAKGEGKRQSEDECFRCGDGGQLVLCDRKFCTKAYHLSCLGLGKRXFGKWECPWHHCDVCGKPSTSFCHLCPNSFCKEHQDGTAFSCTPDGRSYCCEHDLGAASVRSTKTEKPPPEPGKPKGKRRRRRGWRRVTEGK

SEQ ID NO: 409 - protein, 161 aa, Homo sapiens
  SITE (123): Xaa equals any of the naturally occurring L-amino acids
  SITE (129): Xaa equals any of the naturally occurring L-amino acids
  SITE (145): Xaa equals any of the naturally occurring L-amino acids
  SITE (146): Xaa equals any of the naturally occurring L-amino acids
  SITE (157): Xaa equals any of the naturally occurring L-amino acids
MTTWSCLVAMIVSGVITAVWAVRAAPIWRSQVKQKMRIGKQGNCRPPRCICSALGLLAPWMAVVLSQLSVRCVVSWVQGKPSSPRPRGSAASPAPGATPPTPRKPVSWLGYRENHRPKKPKSXTRCLVXQNWSLPPISKDRTAGXXDTNRTRRSGLXLRLG

SEQ ID NO: 410 - protein, 57 aa, Homo sapiens
RPVSTKKKKVSWAWWCTSIAPATLEAKVRGLLEPGRSVSAVSCDPANALSLGSVRPC

SEQ ID NO: 411 - protein, 58 aa, Homo sapiens
VLCLQIYCQTRFSSSLSTSFTVLNCMYRSVILSELTFVKDKRSVLDRYFPFACGCPAP

SEQ ID NO: 412 - protein, 141 aa, Homo sapiens
MKSTLSIFSLWVMIFVLCLQIYCQTRFSSSLSTSFTVLNCMYRSVILSELTFVKDKRSVLDRLFFLLHVVVQHHEDSSFSTELSLYFCQRSDLPLKSLSNLSTSHHLHFQSLRTRGRTRGSTREFRTGTCRRTSFPYSESY

SEQ ID NO: 413 - protein, 141 aa, Homo sapiens [sequence omitted]

SEQ ID NO: 414 - protein, 57 aa, Homo sapiens
MLETLSQFISILFVLLWIISDLILCFLKCGNPGTLDMVLPIWTNQYIHSSRSILSFI

SEQ ID NO: 415 - protein, 57 aa, Homo sapiens [sequence omitted]

SEQ ID NO: 416 - protein, 85 aa, Homo sapiens
  SITE (14): Xaa equals any of the naturally occurring L-amino acids
  SITE (59): Xaa equals any of the naturally occurring L-amino acids
  SITE (68): Xaa equals any of the naturally occurring L-amino acids
LLFLLGMAWFNDWXAALYMPAFCAILVALFAFAMMRDTPQSCGLPPIEEYKNDYPDDYXEKAEQELTXKQPGGRRLWLHPAYTAA

SEQ ID NO: 417 - protein, 66 aa, Homo sapiens
MLFMGFVPWATSSIAVMFVLLFLCGWFQGMGWPPCGRTMVHWWSQKERGGIVSVWNCAHNVGGWVF

SEQ ID NO: 418 - protein, 152 aa, Homo sapiens
MLFMGFVPWATSSIAVMFVLLFLCGWFQGMGWPPCGRTMVHWWSQKERGGIVSVWNCAHNVGGGIPPLLFLLGMAWFNDWHAALYMPAFCAILVALFAFAMMRDTPQSCGLPPIEEYKNDYPDDYNEKAEQELTAKQPGGRRLWLHPAYTAA

SEQ ID NO: 419 - protein, 85 aa, Homo sapiens [sequence omitted]

SEQ ID NO: 420 - protein, 85 aa, Homo sapiens [sequence omitted]

SEQ ID NO: 421 - protein, 64 aa, Homo sapiens
MWETYIWLVLTFAQKACCMKLTATMLKQIHIKKCRSIQWLLRVNSFMESSMSLSSKIRPHQRRN

SEQ ID NO: 422 - protein, 64 aa, Homo sapiens; identical to SEQ ID NO: 421

SEQ ID NO: 423 - protein, 47 aa, Homo sapiens
SQLLRKLRWEDGLSLGGRVCSEPRLHHCTPAWVIGPGLVLTTTTEKK

SEQ ID NO: 424 - protein, 54 aa, Homo sapiens
  SITE (4): Xaa equals any of the naturally occurring L-amino acids
  SITE (23): Xaa equals any of the naturally occurring L-amino acids
IETXRFGGKQMELQEIKSIISSXMWWLMPLILVTQEAEAGGSLEARSLRPPWAT

SEQ ID NO: 425 - protein, 199 aa, Homo sapiens
  SITE (195): Xaa equals any of the naturally occurring L-amino acids
KAGTPAGTGPEFPGRPTRPIYIRRYVFKLGVLGWGAPALLVLLSLSVKSSVYGPCTIPVFDSWENGTGFQNMSICWVRSPVVHSVLVMGYGGLTSLFNLVVLAWALWTLRRLRERADAPSVRACHDTVTVLGLTVLLGTTWALAFFSFGVFLLPQLFLFTILNSLYGFFLFLWFCSQRCRSEAEAKAQIEAFSSXQTTQ

SEQ ID NO: 426 - protein, 160 aa, Homo sapiens
  SITE (133): Xaa equals any of the naturally occurring L-amino acids
  SITE (146): Xaa equals any of the naturally occurring L-amino acids
MSSLASWWPSYGRTQMNSRASVAGPSWLFCSAPFPHCLSYRSHCSSSCLTRPPGAWQRCASTSCWGPWSSRSWPRGPLGPTPRPSWSGWPDGGGAAWRWMCSPSARSATRPRWSLGPPGSSWLGGSCRAEAWXRLPGAGLCHCTPXTHGRTWLAATLCWT

SEQ ID NO: 427 - protein, 13 aa, Homo sapiens
WPSSSRTLSSSRR

SEQ ID NO: 428 - protein, 47 aa, Homo sapiens
ILKSEPKLVSFINILGKEERKKEGGRERKKERKKERKKERKKKKKNS

SEQ ID NO: 429 - protein, 80 aa, Homo sapiens
MSLIWRDVYLYGCGCICHGRCCAGFPQHSRHVWRTNAGLILPGNRVPFCELEGCTRRSSYWNHLVILGGHWGLHLPCTSL

SEQ ID NO: 430 - protein, 80 aa, Homo sapiens; identical to SEQ ID NO: 429

SEQ ID NO: 431 - protein, 107 aa, Homo sapiens
  SITE (7): Xaa equals any of the naturally occurring L-amino acids
  SITE (13): Xaa equals any of the naturally occurring L-amino acids
  SITE (17): Xaa equals any of the naturally occurring L-amino acids
LGKVGNXCRYRSXIPGXTHASGLESTFELPEEFRFLLVSFVFQTHEMATDDKTSPTLDSANDLPRSPTSSSHLTHFKPLTPDQDEPPFKSAYSSFVNLFRFNKGKTY

SEQ ID NO: 432 - protein, 46 aa, Homo sapiens
MCCRAISGCCGTCLACLCSTASGAPQPWPCSRQSTWRLIPRPSAPT

SEQ ID NO: 433 - protein, 43 aa, Homo sapiens
  SITE (5): Xaa equals any of the naturally occurring L-amino acids
  SITE (35): Xaa equals any of the naturally occurring L-amino acids
  SITE (36): Xaa equals any of the naturally occurring L-amino acids
SGFVXAWSILTPGCISPAGEKCRGGKQSLGTNYFXXVLLATDS

SEQ ID NO: 434 - protein, 76 aa, Homo sapiens
  SITE (73): Xaa equals any of the naturally occurring L-amino acids
MHLPLSTKGILPRILLLFIKTLFAFLLSDQCKGLAHLWLRRRECGPGGLTCAAEELKSYTSIFAPKLGVVGGXEMK

SEQ ID NO: 435 - protein, 38 aa, Homo sapiens
  SITE (12): Xaa equals any of the naturally occurring L-amino acids
  SITE (14): Xaa equals any of the naturally occurring L-amino acids
  SITE (38): Xaa equals any of the naturally occurring L-amino acids
PISTKNRKISRXWXCVPVIPATREAEAGESLEPRRWRX

SEQ ID NO: 436 - protein, 74 aa, Homo sapiens
LYGKSKTEVKISPVSNLHSFRLQGVSLYVEAGSLVEFQGSKRGTNICRFCLLWGNSFNHQENSSIGFICSGLPR

SEQ ID NO: 437 - protein, 58 aa, Homo sapiens
MAWSRAAWTVMRSLLICWLVSAYILATVTDVQGSHIGIPGSLLELRHHPRSNESESAC

SEQ ID NO: 438 - protein, 58 aa, Homo sapiens; identical to SEQ ID NO: 437

SEQ ID NO: 439 - protein, 14 aa, Homo sapiens
WRRQARVESLLPML

SEQ ID NO: 440 - protein, 60 aa, Homo sapiens
MWDLSPSTLSLLLLLSPCDVPALALPSAMSKSLLSLLRSRCCHASWTACRTVNQLNLFSL

SEQ ID NO: 441 - protein, 6 aa, Homo sapiens
PCDVHF

SEQ ID NO: 442 - protein, 60 aa, Homo sapiens; identical to SEQ ID NO: 440

SEQ ID NO: 443 - protein, 52 aa, Homo sapiens
MVEHLHLTYHYLKLPCIFACLLLYWFSPLLNSKLQDSRDLVCFLNQWHTVCA

SEQ ID NO: 444 - protein, 8 aa, Homo sapiens
PCCFLCLV

SEQ ID NO: 445 - protein, 87 aa, Homo sapiens
PCCFLCLVCSSSDSHKASSSSSPTLSTPLPCLFSSHTSLLRNFHIASLLLTPPQAPQGWAFPASLTAAALVPGPVPGTQLVARMLIT

SEQ ID NO: 446 - protein, 52 aa, Homo sapiens; identical to SEQ ID NO: 443

SEQ ID NO: 447 - protein, 31 aa, Homo sapiens
MPLSRFWLLLLFLPSHISVLSLIRYPSVKEY

SEQ ID NO: 448 - protein, 31 aa, Homo sapiens; identical to SEQ ID NO: 447

SEQ ID NO: 449 - protein, 43 aa, Homo sapiens
VGASTAHGLLLPLLHIHGGSANSSAPHHPNPWPQADRAWSHYL

SEQ ID NO: 450 - protein, 43 aa, Homo sapiens; identical to SEQ ID NO: 449

SEQ ID NO: 451 - protein, 26 aa, Homo sapiens
  SITE (9): Xaa equals any of the naturally occurring L-amino acids
QFKQYRYAXGMLRGPHIPVSYPNMYF

SEQ ID NO: 452 - protein, 62 aa, Homo sapiens
  SITE (58): Xaa equals any of the naturally occurring L-amino acids
  SITE (62): Xaa equals any of the naturally occurring L-amino acids
MHFAAPFQLQSQTFRYEVGSVRKSQQVLKAVVTALLIPAFSSLSSKACKASFGKKKKXKGKX

SEQ ID NO: 453 - protein, 58 aa, Homo sapiens
  SITE (37): Xaa equals any of the naturally occurring L-amino acids
  SITE (40): Xaa equals any of the naturally occurring L-amino acids
  SITE (47): Xaa equals any of the naturally occurring L-amino acids
EQLLESSLSSTSCETLSSYASGRWLLSPHTPACRVRXYIXGTDRMWXPRSMPSATDIA

SEQ ID NO: 454 - protein, 64 aa, Homo sapiens
MSATHPVPWSVTTWCFFCTWNATCSAGPSPGHRVSSSTASFIRVSYFPSYFSSPLSVTCVPVSS

SEQ ID NO: 455 - protein, 318 aa, Homo sapiens
EAKAQFWLLHSYLFCHSSNVPDLLRPRMTNDSEGKMGFKHPKIMGNFRGHALPGTFFFIIGLWWCTKSILKYICKKQKRTCYLGSKTLFYRLEILEGITIVGMALTGMAGEQFIPGGPHLMLYDYKQGHWNQLLGWHHFTMYFFFGLLGVADILCFTISSLPVSLTKLMLSNALFVEAFIFYNHTHGREMLDIFVHQLLVLVVFLTGLVAFLEFLVRNNVLLELLRSSLILLQGSWFFQIGFVLYPPSGGPAWDLMDHENILFLTICFCWHYAVTIVIVGMNYAFITWLVKSRLKRLCSSEVGLLKNAEREQESEEEM

SEQ ID NO: 456 - protein, 24 aa, Homo sapiens
  SITE (2): Xaa equals any of the naturally occurring L-amino acids
LXKLKMFYKFAFKFSYEAICKLHT

SEQ ID NO: 457 - protein, 19 aa, Homo sapiens
MVSILYLGLFFLNSSVLYA

SEQ ID NO: 458 - protein, 282 aa, Homo sapiens
VNRPSWIMGNFRGHALPGTFFFIIGLWWCTKSILKYICKKQKRTCYLGSKTLFYRLEILEGITIVGMALTGMAGEQFIPGGPHLMLYDYKQGHWNQLLGWHHFTMYFFFGLLGVADILCFTISSLPVSLTKLMLSNALFVEAFIFYNHTHGREMLDIFVHQLLVLVVFLTGLVAFLEFLVRNNVLLELLRSSLILLQGSWFFQIGFVLYPPSGGPAWDLMDHENILFLTICFCWHYAVTIVIVGMNYAFITWLVKSRLKRLCSSEVGLLKNAEREQESEEEM

SEQ ID NO: 459 - protein, 19 aa, Homo sapiens
MVSILYLGLFFLNSSVLYA

SEQ ID NO: 460 - protein, 47 aa, Homo sapiens [sequence omitted]

SEQ ID NO: 461 - protein, 136 aa, Homo sapiens
SAQALHHPPHQGPPLFPSSAHPTVPPYPSQATHHTTLGPGPQHQPSGTGPHCPLPVTGPHLQPQGPNSIPTPTASGFCPHPGSVALPWGFKDLSRHLQCLDRFQFTEHRCHQHFKTITMGQGGIKMDSKNIFLNVL

SEQ ID NO: 462 - protein, 58 aa, Homo sapiens
  SITE (52): Xaa equals any of the naturally occurring L-amino acids
MAVFLISSSYFLLCVFTIRSLRAWVLPFTSVPRAQGGSCCRSQWLYKTLPPXLVCKPV

SEQ ID NO: 463 - protein, 58 aa, Homo sapiens
MAVFLISSSYFLLCVFTIRSLRAWVLPFTSVPRAQGGSCCRSQWLYKTLPPCLVCKPV

SEQ ID NO: 464 - protein, 58 aa, Homo sapiens; identical to SEQ ID NO: 462
  SITE (52): Xaa equals any of the naturally occurring L-amino acids

SEQ ID NO: 465 - protein, 58 aa, Homo sapiens
  SITE (19): Xaa equals any of the naturally occurring L-amino acids
  SITE (25): Xaa equals any of the naturally occurring L-amino acids
  SITE (28): Xaa equals any of the naturally occurring L-amino acids
  SITE (46): Xaa equals any of the naturally occurring L-amino acids
SRCAGAPLQNNGPVREATXLTLQNXGPXREATHLTLQNNGPMREAXHLVLHKWSICLR

SEQ ID NO: 466 - protein, 27 aa, Homo sapiens
MPYGPDPILSNVLLAGYIVLQTLSCPR

SEQ ID NO: 467 - protein, 139 aa, Homo sapiens
MVTVGLVICFSEWCCAGGLSAEQTVSDKHIDALMKEKEAGKSSGHYDPRHQGQALEEPSVHSCIYYLLTEQTQKVSTRTSLLRYRWPCEEVGWCWGLDLTGCPVVIQHEGVAGSEIIISDYPLTNENIKGIPEICLFHI

SEQ ID NO: 468 - protein, 43 aa, Homo sapiens [sequence omitted]

SEQ ID NO: 469 - protein, 38 aa, Homo sapiens
CFLLADVGNSIIFITNFMEQHQFRVKLENQCILIFVDY

SEQ ID NO: 470 - protein, 4 aa, Homo sapiens
VGFL

SEQ ID NO: 471 - protein, 77 aa, Homo sapiens
APRRQAQEWLGRTGNTFAPRLAVTSVKADRREMGPSSSVVAASPSLQDRVIITINNPSRVKKKKKKKKKKKKKKKKK

SEQ ID NO: 472 - protein, 245 aa, Homo sapiens
AWRRRRSGTSGKATWWCSGLRRASPTPSRRVQSWATAVMWKPSPSSSPASWSCTALRAPQSCLRAATVRPVTLQARADSPTVPEPVHRPQDPWHIPGVPEPVHRPQDPWHIPGVPEPVHRPQDPWHIPGVPEPVHRPQDPWPWLQLVPPAELAYCLLMLLLAHCMKQQARPGHPDFLHREAWACLSAAGGLASPGLLLWATARPRASGEAGPGRALVGADAACCPRHSVLSLVDIPSGQVLPQGQ

SEQ ID NO: 473 - protein, 43 aa, Homo sapiens
MAARGRSGVGPPGFLRALALLQLSCGFYWACSRGWMVRGTPHP

SEQ ID NO: 474 - protein, 43 aa, Homo sapiens; identical to SEQ ID NO: 473

SEQ ID NO: 475 - protein, 43 aa, Homo sapiens
MFNLSFFTLYGLCMLKLHSASSWFTLLLLISLFLSVVYCQSTN

SEQ ID NO: 476 - protein, 2 aa, Homo sapiens
LH

SEQ ID NO: 477 - protein, 43 aa, Homo sapiens; identical to SEQ ID NO: 475

SEQ ID NO: 478 - protein, 47 aa, Homo sapiens
MSLLLPPLALLLLLAALVAPATAATAYRPDWNRLSGLTRARVETCGG

SEQ ID NO: 479 - protein, 47 aa, Homo sapiens; identical to SEQ ID NO: 478

SEQ ID NO: 480 - protein, 365 aa, Homo sapiens
  SITE (313): Xaa equals any of the naturally occurring L-amino acids
  SITE (316): Xaa equals any of the naturally occurring L-amino acids
  SITE (333): Xaa equals any of the naturally occurring L-amino acids
  SITE (335): Xaa equals any of the naturally occurring L-amino acids
  SITE (338): Xaa equals any of the naturally occurring L-amino acids
  SITE (339): Xaa equals any of the naturally occurring L-amino acids
  SITE (352): Xaa equals any of the naturally occurring L-amino acids
  SITE (355): Xaa equals any of the naturally occurring L-amino acids
MLSGVWFLSVLTVAGILQTESRKTAKDICKIRCLCEEKENVLNINCENKGFTTVSLLQPPQYRIYQLFLNGNLLTRLYPNEFVNYSNAVTLHLGNNGLQEIRTGAFSGLKTLKRLHLNNNKLEILREDTFLGLESLEYLQADYNYISAIEAGAFSKLNKLKVLILNDNLLLSLPSNVFRFVLLTHLDLRGNRLKVMPFAGVLEHIGGIMEIQLEENPWNCTCDLLPLKAWLDTITVFVGEIVCETPFRLHGKDVTQLTRQDLCPRKSASDSSQRGSHADTHVQRLSPTMNPALNPTRAPKASRPPKMRNRPTXRVXVSKDRQSFGPIMVYQTXVXCAXXLSQQLCLHLSELXQWXECKLPRKEVH

SEQ ID NO: 481 - protein, 23 aa, Homo sapiens
GYWVSFLLHVDGVLAHLTTGGGI

SEQ ID NO: 482 - protein, 191 aa, Homo sapiens
MLSGVWFLSVLTVAGILQTESRKTAKDICKIRCLCEEKENVLNINCENKGFTTVSLLQPPQYRIYQLFLNGNLLTRLYPNEFVNYSNAVTLHLGNNGLQEIRTGAFSGLKTLKRLHLNNNKLEILREDTFLGLESLEYLQADYNYISAIEAGAFSKLNKLKVLILNDNLLLSLPSNVFRFVLLTHLDLRGN

SEQ ID NO: 483 - protein, 845 aa, Homo sapiens
  SITE (477): Xaa equals any of the naturally occurring L-amino acids
MLSGVWFLSVLTVAGILQTESRKTAKDICKIRCLCEEKENVLNINCENKGFTTVSLLQPPQYRIYQLFLNGNLLTRLYPNEFVNYSNAVTLHLGNNGLQEIRTGAFSGLKTLKRLHLNNNKLEILREDTFLGLESLEYLQADYNYISAIEAGAFSKLNKLKVLILNDNLLLSLPSNVFRFVLLTHLDLRGNRLKVMPFAGVLEHIGGIMEIQLEENPWNCTCDLLPLKAWLDTITVFVGEIVCETPFRLHGKDVTQLTRQDLCPRKSASDSSQRGSHADTHVQRLSPTMNPALNPTRAPKASRPPKMRNRPTPRVTVSKDRQSFGPIMVYQTKSPVPLTCPSSCVCTSQSSDNGLNVNCQERKFTNISDLQPKPTSPKKLYLTGNYLQTVYKNDLLEYSSLDLLHLGNNRIAVIQEGAFTNLTSLRRLYLNGNYLEVLYPSMFDGLQSLQYLYLEYNVIKEIKPLTFDALINLQLLXLNNNLLRSLPDNIFGGTALTRLNLRNNHFSHLPVKGVLDQLPAFIQIDLQENPWDCTCDIMGLKDWTEHANSPVIINEVTCESPAKHAGEILKFLGREAICPDSPNLSDGTVLSMNHNTDTPRSLSVSPSSYPELHTEVPLSVLILGLLVVFILSVCFGAGLFVFVLKRRKGVPSVPRNTNNLDVSSFQLQYGSYNTETHDKTDGHVYNYIPPPVGQMCQNPIYMQKEGDPVAYYRNLQEFSYSNLEEKKEEPATPAYTISATELLEKQATPREPELLYQNIAERVKELPSAGLVHYNFCTLPKRQFAPSYESRRQNQDRINKTVLYGTPRKCFVGQSKPNHPLLQAKPQSEPDYLEVLEKQTAISQL

SEQ ID NO: 484 - protein, 141 aa, Homo sapiens
  SITE (125): Xaa equals any of the naturally occurring L-amino acids
  SITE (131): Xaa equals any of the naturally occurring L-amino acids
FCLLHVPASCYCSFSNGITSPCHALGSPSLSISVLLSWLNPSTILNTGSSCPIPRLTLSDLPISLAFHAPLPPPPGFNWVRAVFLPLCSASALRTPRGLGGKVLTIFTLCLPLHHLFITSQPLLXQVFTHXLFLQVFDWRE

SEQ ID NO: 485 - protein, 8 aa, Homo sapiens
SHIVTCLG

SEQ ID NO: 486 - protein, 42 aa, Homo sapiens
MGLKNSSLITCFLLAFVVFVLFCLFCFVFLCYFIGKVSGMCS

SEQ ID NO: 487 - protein, 42 aa, Homo sapiens; identical to SEQ ID NO: 486

SEQ ID NO: 488 - protein, 27 aa, Homo sapiens
MRRMASALLLDQLTKALLSGHQNWKAF

SEQ ID NO: 489 - protein, 137 aa, Homo sapiens
  SITE (1): Xaa equals any of the naturally occurring L-amino acids
  SITE (7): Xaa equals any of the naturally occurring L-amino acids
  SITE (33): Xaa equals any of the naturally occurring L-amino acids
XRCFTFXFTDIVIMPKRKFPENTEGKDGSKVTXQEPTRRSARLSAKPAPPKPEPKPRKTSAKKEPGAKISRGAKGKKEEKQEAGKEGTAPSENGETKAEEIHISRSTVNVSTSRGTPPSTLSVKGQIETVRVKGTEN

SEQ ID NO: 490 - protein, 46 aa, Homo sapiens
  SITE (38): Xaa equals any of the naturally occurring L-amino acids
NKPDTGRKILHDLICGILKKKKKKSQIYRVNKRVGYQXQVGGEWEM

SEQ ID NO: 491 - protein, 50 aa, Homo sapiens
MQPPFVLTTTTMISLFLALISTKKVHLTIPQPFTSHSRLSFDVFKRKARA

SEQ ID NO: 492 - protein, 228 aa, Homo sapiens
TQDHQKLCYSALILAMVFSMGEAVPYAHYEHLGTPFAQFLLNIVEDGLPLDTTEQLPDLCVNLLLALNLHLPAADQNVIMAALSKHANVKIFSEKLLLLLNRGDDPVRIFKHEPQPPHSVLKFLQDVFGSPATAAIFYHTDMMALIDITVRHIADLSPGDKLRMEYLSLMHAIVRTTPYLQHRHRLPDLQAILRRILNEEETSPQCQMDRMIVREMCKEFLVLGEAPS

SEQ ID NO: 493 - protein, 13 aa, Homo sapiens
PFHFSTPSITGLF

SEQ ID NO: 494 - protein, 2 aa, Homo sapiens
FL

SEQ ID NO: 495 - protein, 50 aa, Homo sapiens; identical to SEQ ID NO: 491

SEQ ID NO: 496 - protein, 71 aa, Homo sapiens [sequence omitted]

SEQ ID NO: 497 - protein, 14 aa, Homo sapiens
LFILVLHNEDNLYG

SEQ ID NO: 498 - protein, 71 aa, Homo sapiens [sequence omitted]

SEQ ID NO: 499 - protein, 167 aa, Homo sapiens
  SITE (82): Xaa equals any of the naturally occurring L-amino acids
  SITE (88): Xaa equals any of the naturally occurring L-amino acids
  SITE (96): Xaa equals any of the naturally occurring L-amino acids
  SITE (106): Xaa equals any of the naturally occurring L-amino acids
  SITE (111): Xaa equals any of the naturally occurring L-amino acids
GRCLDCFNPFLLSCPRIGLVEQGGVKIEPLPKEVKVYLLTTSSAPYCMHHSLVEFHLKELRNKDTNIEVTFLSSNITSSSKXTIPKQXRYGERNHXPMPTPQCQIXQVKFXFQSSNRVWKKDRTTIIGKFCTALLPVNDREKMVCLPEPVNLQASVTVSCDLKIACV

SEQ ID NO: 500 - protein, 1 aa, Homo sapiens
M

SEQ ID NO: 501 - protein, 14 aa, Homo sapiens
TTEICGTLILREMI

SEQ ID NO: 502 - protein, 67 aa, Homo sapiens
MSLFLTLALCSVLLVHLNVLARNCFYDSGFVVHPWIWLGHSLPYFYFSPLSQRLFSYLWTFIFPCRL

SEQ ID NO: 503 - protein, 67 aa, Homo sapiens; identical to SEQ ID NO: 502

SEQ ID NO: 504 - protein, 5 aa, Homo sapiens
LYLFM

SEQ ID NO: 505 - protein, 65 aa, Homo sapiens
IIYLLFVTKWEIRKKVRKYLRGKSFLLSHVFSTCLPWYIINTDILHTPCKILLKLSSTWHVEYVP

SEQ ID NO: 506 - protein, 151 aa, Homo sapiens [sequence omitted]

SEQ ID NO: 507 - protein, 31 aa, Homo sapiens
LFLPFSMVLFCDPLNSKGSLICGCFRAVLPR

SEQ ID NO: 508 - protein, 151 aa, Homo sapiens
  SITE (130): Xaa equals any of the naturally occurring L-amino acids
MVVAAVYILYLLFLIVRACSELRHMPYVDLRLKFLTALTFVVLVISIAILYLRFGAQVLQDNFVAELSTHYQNSAEFLSFYGLLNFYLYTLAFVYSPSKNALYESQLKDNPAFSMLNDSDDDVIYGSDYXEMPLQNGQAIRAKYKEESDSD

SEQ ID NO: 509 - protein, 51 aa, Homo sapiens [sequence omitted]

SEQ ID NO: 510 - protein, 51 aa, Homo sapiens [sequence omitted]

SEQ ID NO: 511 - protein, 101 aa, Homo sapiens
LRDPENCVECGDGECACGCTHIGYLCVCTVYMQGCVYVCMCIRVWVWVWGVFRECAYTHGCLGMCTCLCVRGVCVCVCMVCVHMYALVCVHTWGVCAYVEV

SEQ ID NO: 512 - protein, 90 aa, Homo sapiens
  SITE (5): Xaa equals any of the naturally occurring L-amino acids
MYRGXRVKHPFVFRKLQVTQDDWIVRYRGLKGNAEVVHREQVNLPRTMGLRHALLTRRATRSMGAICVAGCGIPAQVSLSKRGILLVPKT

SEQ ID NO: 513 - protein, 45 aa, Homo sapiens
  SITE (39): Xaa equals any of the naturally occurring L-amino acids
LGSARHRPHALVLGMSSPFLKKTCSAVTTTKKHGEDWAXDMMFSS

SEQ ID NO: 514 - protein, 35 aa, Homo sapiens
  SITE (15): Xaa equals any of the naturally occurring L-amino acids
  SITE (20): Xaa equals any of the naturally occurring L-amino acids
LTSFGLRAILIFQMXSDVNXIGKHQRNGCKVSGTE

SEQ ID NO: 515 - protein, 50 aa, Homo sapiens [sequence omitted]

SEQ ID NO: 516 - protein, 75 aa, Homo sapiens
SPIIFPLNHYTRISHLCPPDILGWIILGLGGCPVRCRTFSSILGLFLLDASSTPFLSYDRLKCPPGKRWWQNYPW

SEQ ID NO: 517 - protein, 60 aa, Homo sapiens
MNESFYCSAFLPAFIVCWILAILIVLTCGFRMTDYIEHLHEILCHLYIFFGKASISGLST

SEQ ID NO: 518 - protein, 60 aa, Homo sapiens; identical to SEQ ID NO: 517

SEQ ID NO: 519 - protein, 33 aa, Homo sapiens
MAAAWFILLFKHCVHSSSIVDLSFKESSPWDIK

SEQ ID NO: 520 - protein, 12 aa, Homo sapiens
AWYVIITLVFDG

SEQ ID NO: 521 - protein, 15 aa, Homo sapiens
  SITE (10): Xaa equals any of the naturally occurring L-amino acids
  SITE (12): Xaa equals any of the naturally occurring L-amino acids
AWYVVMALTXMXWDF

SEQ ID NO: 522 - protein, 17 aa, Homo sapiens [sequence omitted]

SEQ ID NO: 523 - protein, 33 aa, Homo sapiens; identical to SEQ ID NO: 519

SEQ ID NO: 524 - protein, 85 aa, Homo sapiens
  SITE (32): Xaa equals any of the naturally occurring L-amino acids
LWRYLGFCILCHIWQKTFYLCCHEKGCTMTQXPPQASGPAEAKSEHREKRRKREDRWGKQERRDRDVHILGCQVWHSCSARVALS

SEQ ID NO: 525 - protein, 91 aa, Homo sapiens
  SITE (69): Xaa equals any of the naturally occurring L-amino acids
MRACVCVYACAHMCVCLAFSYLIGCIKCRPKDEGEDYTQSLAVTASVQKSCVWAQNYSLHSCNTYASRXQRALSPGLHNRREKQLCGELVT

SEQ ID NO: 526 - protein, 96 aa, Homo sapiens
MRACVCVYACAHMCVCLAFSYLIGCIKCRPKDEGEDLHPKPGCDSFCPEKLCLGSELLTTFMQYICKQGAESFITGATQQKGKTVMWRAGDLTREA

SEQ ID NO: 527 - protein, 48 aa, Homo sapiens [sequence omitted]

SEQ ID NO: 528 - protein, 4 aa, Homo sapiens
MFKM

SEQ ID NO: 529 - protein, 10 aa, Homo sapiens
IYQHFSLWLG

SEQ ID NO: 530 - protein, 48 aa, Homo sapiens [sequence omitted]

SEQ ID NO: 531 - protein, 22 aa, Homo sapiens
HSDLGLSCPELLLPCIILITFS

SEQ ID NO: 532 - protein, 96 aa, Homo sapiens
MHHHAHLSCYDFLMLLFLLLHPLLPPPPTASLPPSPLICLFLHTVPWNLSLASSHSTHSLRALPFTSAIVYTFTLDHSSEISQLLHPDGCSAPPPG

SEQ ID NO: 533 - protein, 111 aa, Homo sapiens
MHHHAHLSCYDFLMLLFLLLHPLLPPPPTASLPPSPLICLFLHTVPWNLSLASSHSTHSLRALPFTSAIVYTFTLDHSSEISQLLHPDGCSAPPPGCPTGTLNPTSPKLNS

SEQ ID NO: 534 - protein, 70 aa, Homo sapiens
  SITE (20): Xaa equals any of the naturally occurring L-amino acids
  SITE (60): Xaa equals any of the naturally occurring L-amino acids
GRKRDGGWRKGQKAQVEVPXLLARRILWPLGGWSGCVNQSLSQWRAGLVVCVFITGPHPXHTHTRTHCGV

SEQ ID NO: 535 - protein, 70 aa, Homo sapiens [sequence omitted]

SEQ ID NO: 536 - protein, 55 aa, Homo sapiens
MVAVCWCLALTAKVSASCSYMKLRPWPADPWQCWAWTWLPQPCCPATTQTLAWCS

SEQ ID NO: 537 - protein, 40 aa, Homo sapiens
MKCSKVLTQLILFTPLGVCKMSLFYKHNHNSNKPQVVASV

SEQ ID NO: 538 - protein, 40 aa, Homo sapiens; identical to SEQ ID NO: 537

SEQ ID NO: 539 - protein, 195 aa, Homo sapiens [sequence omitted]

SEQ ID NO: 540 - protein, 68 aa, Homo sapiens
  SITE (14): Xaa equals any of the naturally occurring L-amino acids
WPTVASPRTASRPXGPCQNCACWTTSGAGCRPGQTSMPPWTTGPRCCTSQPPTGSARRLPCCWNTEPA

SEQ ID NO: 541 - protein, 201 aa, Homo sapiens
RQAVIVCRRRFVMGPVRLGILLFLFLAVHEAWAGMLKEEDDDTERLPSKCEVCKLLSTELQAELSRTGRSREVLELGQVLDTGKRKRHVPYSVSETRLEEALENLCERILDYSVHAERKGSLRYAKGQSQTMATLKGLVQKGVKVDLGIPLELWDEPSVEVTYLKKQCETMLEEEEEEEEEEGGDKMTKTGSHPKLDREDL

SEQ ID NO: 542 - protein, 15 aa, Homo sapiens
MPPRAAWAWLLCGAS

SEQ ID NO: 543 - protein, 15 aa, Homo sapiens
MPPRAAWAWLLCGAS

SEQ ID NO: 544 - protein, 116 aa, Homo sapiens
  SITE (7): Xaa equals any of the naturally occurring L-amino acids
  SITE (16): Xaa equals any of the naturally occurring L-amino acids
SQLLRRXRQEDCLSPXGGSCSEPRLRHCTPAWVTERDSVSKKKKKTSEVGAVPYFCPTPIKRIPKTTCGNLIILSNLLFGQDWHLPCFSLLLAVKHGFKEECFSEFTLYISDLEVI

SEQ ID NO: 545 - protein, 51 aa, Homo sapiens [sequence omitted]

SEQ ID NO: 546 - protein, 51 aa, Homo sapiens [sequence omitted]

SEQ ID NO: 547 - protein, 69 aa, Homo sapiens
MAAARNLRTALIFGGFISMVGAAFYPIYFRPLMRLEEYQKEQAVNRAGIVQEDVQPPGLKVWSDPFGRK

SEQ ID NO: 548 - protein, 69 aa, Homo sapiens; identical to SEQ ID NO: 547

SEQ ID NO: 549 - protein, 79 aa, Homo sapiens
SGWQVPSSVKHLPYDNLRSHCVADEGETEVEGTRATWVEHSGRPGVGSGRPPGTSLTTLPLLLTHLSLTCPLGGDFSKR

SEQ ID NO: 550 - protein, 89 aa, Homo sapiens
MPVPLLASAAWCHLCAGALPAWLWLPWRAAAAQWHVCASHCLPLHPAFSALGPHPDPGRAGPGAAPRDCAHPELHPLCLPRWSLQLLPR

SEQ ID NO: 551 - protein, 21 aa, Homo sapiens
PWASSHLGPRPYVHGLAPSGP

SEQ ID NO: 552 - protein, 6 aa, Homo sapiens
PWPPLV

SEQ ID NO: 553 - protein, 6 aa, Homo sapiens
PWPPLV

SEQ ID NO: 554 - protein, 52 aa, Homo sapiens
DILNLYCTFYLRGSSFTCVFICVYLSYSKRSRESPCPRSSILRSEDVQNSSR

SEQ ID NO: 555 - protein, 39 aa, Homo sapiens [sequence omitted]

SEQ ID NO: 556 - protein, 12 aa, Homo sapiens
GGNVLIFHFRCL

SEQ ID NO: 557 - protein, 70 aa, Homo sapiens
MSHCTWPLDYSFLFMSCASICGQHGASVGNTGRKQVQIWLGLLAWQLGKPPLLWLLPRLFMTVAAHQLQL

SEQ ID NO: 558 - protein, 70 aa, Homo sapiens; identical to SEQ ID NO: 557

SEQ ID NO: 559 - protein, 62 aa, Homo sapiens
VYQRKSTVVLGGFLLWDIDFLFFFRNIVCCNLNKNYDILRYFIDKPNKNICFYFKVNVFLFS

SEQ ID NO: 560 - protein, 47 aa, Homo sapiens
MLRFSSSLLECLLSPLCLTDATGHHLDHPILVPVQVQKRNNVLKFTS

SEQ ID NO: 561 - protein, 49 aa, Homo sapiens [sequence omitted]

SEQ ID NO: 562 - protein, 49 aa, Homo sapiens [sequence omitted]

SEQ ID NO: 563 - protein, 47 aa, Homo sapiens
  SITE (25): Xaa equals any of the naturally occurring L-amino acids
MLIFSFLSFWFFQSCQGFIYFMSIXEEPVADFVHLYCVFYFQGCSYL

SEQ ID NO: 564 - protein, 128 aa, Homo sapiens
FSNTWSFPKDAFYTDFYLKSIVVREYCVFCSNPLKYIETCLICKYRFSYFSICDWKNINLTIWGYSIHTIHTNIYVFSVLQNFYIFPGICLLASLITERCTILSCTFFCCSLIFLSYPYGNCIKCIPI

SEQ ID NO: 565 - protein, 47 aa, Homo sapiens
MLIFSFLSFWFFQSCQGFIYFMSIFEEPVADFVHLYCVFYFQGCSYL

SEQ ID NO: 566 - protein, 34 aa, Homo sapiens
PCSWLRAVTLCQNLHWACTSCHCNCPCQCPQLLF

SEQ ID NO: 567 - protein, 193 aa, Homo sapiens [sequence omitted]

SEQ ID NO: 568 - protein, 138 aa, Homo sapiens
MCLLFLLPRFPVSWRAGVDGAAPSSQDLWRIRSPCGDCEGFDVHIMDDMIKVGRATLCIVPPTCSCIAGLSQGPSLGSTGSSVGGSEVRCCHFVWFNMSIAWYQPCSWLRAVTLCQNLHWACTSCHCNCPCQCPQLLF

SEQ ID NO: 569 - protein, 48 aa, Homo sapiens [sequence omitted]

SEQ ID NO: 570 - protein, 17 aa, Homo sapiens
FLSLLFFFLAFSFFTEA

SEQ ID NO: 571 - protein, 48 aa, Homo sapiens [sequence omitted]

SEQ ID NO: 572 - protein, 184 aa, Homo sapiens
  SITE (153): Xaa equals any of the naturally occurring L-amino acids
  SITE (178): Xaa equals any of the naturally occurring L-amino acids
  SITE (181): Xaa equals any of the naturally occurring L-amino acids
  SITE (182): Xaa equals any of the naturally occurring L-amino acids
VRMKYLFFSWLVVFVGSWIIYVQYSTYTELCRGKDCKKIICDKYKTGVIDGPACNSLCVTETLYFGKCLSTKPNNQMYLGIWDNLPGVVKCQMEQALHLDFGTELEPRKEIVLFDKPTRGTTVQKFKEMVYSLFKAKLGDQGNLSELVNLILXVADGDKDGQVSLGEAKSAWALLQLXEFXXHG

SEQ ID NO: 573 - protein, 3 aa, Homo sapiens
YTV

SEQ ID NO: 574 - protein, 403 aa, Homo sapiens
MKYLFFSWLVVFVGSWIIYVQYSTYTELCRGKDCKKIICDKYKTGVIDGPACNSLCVTETLYFGKCLSTKPNNQMYLGIWDNLPGVVKCQMEQALHLDFGTELEPRKEIVLFDKPTRGTTVQKFKEMVYSLFKAKLGDQGNLSELVNLILTVADGDKDGQVSLGEAKSAWALLQLNEFLLMVILQDKEHTPKLMGFCGDLYVMESVEYTSLYGISLPWVIELFIPSGFRRSMDQLFTPSWPRKAKIAIGLLEFVEDVFHGPYGNFLMCDTSAKNLGYNDKYDLKMVDMRKIVPETNLKELIKDRHCESDLDCVYGTDCRTSCDQSTMKCTSEVIQPNLAKACQLLKDYLLRGAPSEIREELEKQLYSCIALKVTANQMEMEHSLILNNLKTLLWKKISYTNDS

SEQ ID NO: 575 - protein, 60 aa, Homo sapiens
MSRFSQNFRGKEDHIVFLFCFNEIFFLLLMLLVFPWLLSKAVSGFAERLEMTTIFRVSRS

SEQ ID NO: 576 - protein, 60 aa, Homo sapiens; identical to SEQ ID NO: 575

SEQ ID NO: 577 - protein, 127 aa, Homo sapiens [sequence omitted]

SEQ ID NO: 578 - protein, 9 aa, Homo sapiens
LGKPWRYPT

SEQ ID NO: 579 - protein, 127 aa, Homo sapiens [sequence omitted]

SEQ ID NO: 580 - protein, 61 aa, Homo sapiens
MKSALHRDICILMLTAALFTIAKTEKQHKCPSIDEQINNLQYICTMEYHSALQKEMLLYLQ

SEQ ID NO: 581 - protein, 61 aa, Homo sapiens; identical to SEQ ID NO: 580

SEQ ID NO: 582 - protein, 61 aa, Homo sapiens; identical to SEQ ID NO: 580

SEQ ID NO: 583 - protein, 41 aa, Homo sapiens
MLVSMCMGLLFLQVGKQCIAFFYTESTRRPKHLKTMGSGYA

SEQ ID NO: 584 - protein, 41 aa, Homo sapiens; identical to SEQ ID NO: 583

SEQ ID NO: 585 - protein, 241 aa, Homo sapiens
  SITE (58): Xaa equals any of the naturally occurring L-amino acids
MFKLRQMRVEKFIYENHPDVFSDSSMDHFQKFLPTVGGQLGTAGQGFSYSKSNGRGGXQAGGSGSAGQYGSDQQHHLGSGSGAGGTGGPAGQAGRGGAAGTAGVGETGSGDQAGGEGKHITVFKTYISPWERAMGVDPQQKMELGIDLLAYGAKAELPKYKSFNRTAMPYGGYEKASKRMTFQMPKFDLGPLLSEPLVLYNQNLSNRPSFNRTPIPWLSSGEPVDYNVDIGIPLDGETEEL

SEQ ID NO: 586 - protein, 241 aa, Homo sapiens [sequence omitted]

SEQ ID NO: 587 - protein, 17 aa, Homo sapiens
RFPISPHPYQHAFLFFF

SEQ ID NO: 588 - protein, 39 aa, Homo sapiens
LRVAVGLCPRDALLLSPPRVVVCGVTDVVVDKGVGLLVV

SEQ ID NO: 589 - protein, 23 aa, Homo sapiens
  SITE (5): Xaa equals any of the naturally occurring L-amino acids
MRVTXSSHPCQRLVLQCSGFWLF

SEQ ID NO: 590 - protein, 27 aa, Homo sapiens
MRVTVSSHPCQRLVLSVFWLLAILIGV

SEQ ID NO: 591 - protein, 55 aa, Homo sapiens
MESSTGKASPRCHIHCVPPFPPPCPVKRVGRLFLFFQHFPQGTVIIPLMPSPPLD

SEQ ID NO: 592 - protein, 314 aa, Homo sapiens
  SITE (129): Xaa equals any of the naturally occurring L-amino acids
YSKTHSIKSAQPGVPTSARSPRQPSPGPTPPPFPGNRGTALGGGSIRQSPLSSSSPFSNRPPLPPTPSRALDDKPPPPPPPVGNRPSIHREAVPPPPPQNNKPPVPSTPRPSAASQAPPPPPPPSRPGXPPLPPSSSGNDETPRLPQRNLSLSSSTPPLPSPGRSGPLPPPPSERPPPPVRDPPGRSGPLPPPPPVSRNGSTSRALPATPQLPSRSGVDSPRSGPRPPLPPDRPSAGAPPPPPPSTSIRNGFQDSPCEDEWESRFYFHPISDLPPPEPYVQTTKSYPSKLARNESRSGSNRRERGAPPLPPIPR

SEQ ID NO: 593 - protein, 55 aa, Homo sapiens; identical to SEQ ID NO: 591

SEQ ID NO: 594 - protein, 53 aa, Homo sapiens
  SITE (23): Xaa equals any of the naturally occurring L-amino acids
FIIHSISPVALNPQAHDLPFSLXSCVSVFNLRSFPTMDSCTTLNETSIFQRRV

SEQ ID NO: 595 - protein, 261 aa, Homo sapiens
GIFRSLRVLFPLFSVGRPQFARSLSAAPQLSDTADTMGFGDLKSPAGLQVLNDYLADKSYIEGYVPSQADVAVFEAVSSPPPADLCHALRWYNHIKSYEKEKASLPGVKKALGKYGPADVEDTTGSGATDSKDDDDIDLFGSDDEEESEEAKRLREERLAQYESKKAKKPALVAKSSILLDVKPWDDETDMAKLEECVRSIQADGLVWGSSKLVPVGYGIKKLQIQCVVEDDKVGTDMLEEQITAFEDYVQSMDVAAFNKI

SEQ ID NO: 596 - protein, 44 aa, Homo sapiens
MKKEMVLLTTTYFSLHVKVFFCLFVCFSILSSSRRGSLANNSSW

SEQ ID NO: 597 - protein, 44 aa, Homo sapiens; identical to SEQ ID NO: 596

SEQ ID NO: 598 - protein, 42 aa, Homo sapiens
MFTLLLSSFFLQHCLQNNLYASEREQIFSNFLQLSSLKRRIC

SEQ ID NO: 599 - protein, 6 aa, Homo sapiens
LLLSSF

SEQ ID NO: 600 - protein, 42 aa, Homo sapiens; identical to SEQ ID NO: 598

SEQ ID NO: 601 - protein, 86 aa, Homo sapiens
  SITE (6): Xaa equals any of the naturally occurring L-amino acids
  SITE (21): Xaa equals any of the naturally occurring L-amino acids
  SITE (31): Xaa equals any of the naturally occurring L-amino acids
  SITE (76): Xaa equals any of the naturally occurring L-amino acids
LGSPEXAQKVDITSAHFIGQXSRPSDFAQVXSLEGSRPVIWSLNGWTLKETPRADGVFTETAGQGLGTAQGHLLWXAAATGSPDCS

SEQ ID NO: 602 - protein, 44 aa, Homo sapiens
MGVALPSPLLCSLPLFLLFGDVSGSSSLLALLPFLHPWHHPSLS

SEQ ID NO: 603 - protein, 44 aa, Homo sapiens; identical to SEQ ID NO: 602

SEQ ID NO: 604 - protein, 60 aa, Homo sapiens [sequence omitted]

SEQ ID NO: 605 - protein, 17 aa, Homo sapiens
ITFSCFFCNNCSQVNLQ

SEQ ID NO: 606 - protein, 60 aa, Homo sapiens [sequence omitted]

SEQ ID NO: 607 - protein, 97 aa, Homo sapiens
  SITE (87): Xaa equals any of the naturally occurring L-amino acids
  SITE (92): Xaa equals any of the naturally occurring L-amino acids
LGAEHFKCITWVAGWAVPGLKGVGSFFQGAPSASWHRTLAPAHPKLTLVGVGPLTQTWPLPSLVLLPQLSPVCGRVCLDRLWAGQGXGQAEXEFVLG

SEQ ID NO: 608 - protein, 318 aa, Homo sapiens
MRLLAGWLCLSLASVWLARRMWTLRSPLTRSLYVNMTSGPGGPAAAAGGRKENHQWYVCNREKLCESLQAVFVQSYLDQGTQIFLNNSIEKSGWLFIQLYHSFVSSVFSLFMSRTSINGLLGRGSMFVFSPDQFQRLLKINPDWKTHRLLDLGAGDGEVTKIMSPHFEEIYATELSETMIWQLQKKKYRVLGINEWQNTGFQYDVISCLNLLDRCDQPLTLLKDIRSVLEPTRGRVILALVLPFHPYVENVGGKWEKPSEILEIKGQNWEEQVNSLPEVFRKAGFVIEAFTRLPYLCEGDMYNDYYVLDDAVFVLKPV

SEQ ID NO: 609 - protein, 318 aa, Homo sapiens
MRLLAGWLCLSLASVWLARRMWTLRSPLTRSLYVNMTSGPGGPAAAAGGRKENHQWYVCNREKLCESLQAVFVQSYLDQGTQIFLNNSIEKSGWLFIQLYHSFVSSVFSLFMSRTSINGLLGRGSMFVFSPDQFQRLLKINPDWKTHRLLDLGAGDGEVTKIMSPHFEEIYATELSETMIWQLQKKKYRVLGINEWQNTGFQYDVISCLNLLDRCDQPLTLLKDIRSVLEPTRGRVILALVLPFHPYVENVGGKWEKPSEILEIKGQNWEEQVNSLPEVFRKAGFVIEAFTRLPYLCEGDMYNAYYVLDDAVFVLKPV

SEQ ID NO: 610 - protein, 195 aa, Homo sapiens
  SITE (159): Xaa equals any of the naturally occurring L-amino acids
  SITE (175): Xaa equals any of the naturally occurring L-amino acids
MWTLFALSGPLFLFQVLTFMIYIVSTVFCGHLGKVELASVTLAVAFVNVCGVSVGVGLSSACDTLMSQSFGSPNKKHVGVILQRGALVLLLCCLPCWALFLNTQHILLLFRQDPDVSRLTQDYVMIFIPGLPVIFLYNLLAKYLQNQVQVFSVWGGPSXSTLPYSSGRGAWGFPXLSTICEPALERGSLPTHLPY

SEQ ID NO: 611 - protein, 37 aa, Homo sapiens
LAGPVFIYFRRSPGPKSSVVWWATVSTVWPTMPWFLC

SEQ ID NO: 612 - protein, 3 aa, Homo sapiens
IPG

SEQ ID NO: 613 - protein, 180 aa, Homo sapiens
MWTLFALSGPLFLFQVLTFMIYIVSTVFCGHLGKVELASVTLAVAFVNVCGVSVGVGLSSACDTLMSQSFGSPNKKHVGVILQRGALVLLLCCLPCWALFLNTQHILLLFRQDPDVSRLTQDYVMIFIPGLPVIFLYNLLAKYLQNQVQVFECVGRPFSQHTALFQWEGGLGLSPSLHHL

SEQ ID NO: 614 - protein, 38 aa, Homo sapiens
EKKKKKKKRPGAVAHALIPALWETEAGGSPEVGSSRPA

SEQ ID NO: 615 - protein, 18 aa, Homo sapiens
MVRTLSLAVLSWLPAAVC

SEQ ID NO: 616 - protein, 18 aa, Homo sapiens
MVRTLSLAVLSWLPAAVC

SEQ ID NO: 617 - protein, 42 aa, Homo sapiens
MLLSWTVLIIILPFAGDVSSHLCILRPFAGSVSSCLSNFKRI

SEQ ID NO: 618 - protein, 42 aa, Homo sapiens; identical to SEQ ID NO: 617

SEQ ID NO: 619 - protein, 93 aa, Homo sapiens [sequence omitted]

SEQ ID NO: 620 - protein, 403 aa, Homo sapiens
  SITE (175): Xaa equals any of the naturally occurring L-amino acids
  SITE (320): Xaa equals any of the naturally occurring L-amino acids
  SITE (331): Xaa equals any of the naturally occurring L-amino acids
  SITE (368): Xaa equals any of the naturally occurring L-amino acids
MATAERRALGIGFQWLSLATLVLICAGQGGRREDGGPACYGGFDLYFILDKSGSVLHHWNEIYYFVEQLAHKFISPQLRMSFIVFSTRGTTLMKLTEDREQIRQGLEELQKVLPGGDTYMHEGFERASEQIYYENRQGYRTASVIIALTDGELHEDLFFYSEREANRSRDLGAIXYCVGVKDFNETQLARIADSKDHVFPVNDGFQALQGIIHSILKKSCIEILAAEPSTICAGESFQVVVRGNGFRHARNVDRVLCSFKINDSVTLNEKPFSVEDTYLLCPAPILKEVGMKAALQVSMNDGLSFISSSVIITTTHCSDXSILAIALLILXLLLALALLWWFWPLCCTVIIKEVPPPPAEESEVSDHXRMAVGGQGGRVGWRAGWAAGHLAPCRAELSQAQRI

SEQ ID NO: 621 - protein, 403 aa, Homo sapiens
MATAERRALGIGFQWLSLATLVLICAGQGGRREDGGPACYGGFDLYFILDKSGSVLHHWNEIYYFVEQLAHKFISPQLRMSFIVFSTRGTTLMKLTEDREQIRQGLEELQKVLPGGDTYMHEGFERASEQIYYENRQGYRTASVIIALTDGELHEDLFFYSEREANRSRDLGAIVYCVGVKDFNETQLARIADSKDHVFPVNDGFQALQGIIHSILKKSCIEILAAEPSTICAGESFQVVVRGNGFRHARNVDRVLCSFKINDSVTLNEKPFSVEDTYLLCPAPILKEVGMKAALQVSMNDGLSFISSSVIITTTHCSDGSILAIALLILFLLLALALLWWFWPLCCTVIIKEVPPPPAEESEVSDHSRMAVGGQGGRVGWRAGWAAGHLAPCRAELSQAQRI

SEQ ID NO: 622 - protein, 156 aa, Homo sapiens
  SITE (102): Xaa equals any of the naturally occurring L-amino acids
VVKITHCPTLLTRDGDRIRSNGKFGGLQNKAPPMDKLRGMVFGAPVPKQCLILGEQIDLLQQYRSAVCKLDSVNKDLNSQLEYLRTPDMRKKKQELDEHEKXLKLIEEKLGMTPIRKCNDSLRHSPKVETTDCPVPPKRMRREATRQNRIITKTDV

SEQ ID NO: 623 - protein, 175 aa, Homo sapiens
  SITE (91): Xaa equals any of the naturally occurring L-amino acids
  SITE (173): Xaa equals any of the naturally occurring L-amino acids
  SITE (174): Xaa equals any of the naturally occurring L-amino acids
  SITE (175): Xaa equals any of the naturally occurring L-amino acids
VFGMLLGDTIILDNLDAANHYRKEVVKITHCPTLLTRDGDRIRSNGKFGGLQNKAPPMDKLRGMVFGAPVPKQCLILGEQIDLLQQYRSAXCKLDSVNKDLNSQLEYLRTPDMRKKKQELDEHEKNLKLIEEKLGMTPIRKCNDSLRHSPKVETTDCPVPPKRMRREAGDKRXXX

SEQ ID NO: 624 - protein, 24 aa, Homo sapiens
MWHLWRRLLSCFPVAMLQDYKYSV

SEQ ID NO: 625 - protein, 20 aa, Homo sapiens
SCLPVGTDPQQMQKHLVVIK

SEQ ID NO: 626 - protein, 24 aa, Homo sapiens
MWHLWRRLLSCFPVAMLQDYKYSV

SEQ ID NO: 627 - protein, 439 aa, Homo sapiens
  SITE (358): Xaa equals any of the naturally occurring L-amino acids
MVPSSPRALFLLLLILACPEPRASQNCLSKQQLLSAIRQLQQLLKGQETRFAEGIRHMKSRLAALQNSVGRVGPDALPVSCPALNTPADGRKFGSKYLVDHEVHFTCNPGFRLVGPSSVVCLPNGTWTGEQPHCRGISECSSQPCQNGGTCVEGVNQYRCICPPGRTGNRCQHQAQTAAPEGSVAGDSAFSRAPRCAQVERAQHCSCEAGFHLSGAAGDSVCQDVNECELYGQEGRPRLCMHACVNTPGSYRCTCPGGYRTLADGKSCEDVDECVGLQPVCPQGTTCINTGGSFQCVSPECPEGSGNVSYVKTSPFQCERNPCPMDSRPCRHLPKTISFHYLSLPSNLKTPITLFRMXTASAPGRAGPNSLRFGIVGGNSRGHFVMQRSDRQTGDLILVQNLEGPQTLEVDVDMSEYLDRSFQANHVSKVTIFVSPYDF

SEQ ID NO: 628 - protein, 439 aa, Homo sapiens
MVPSSPRALFLLLLILACPEPRASQNCLSKQQLLSAIRQLQQLLKGQETRFAEGIRHMKSRLAALQNSVGRVGPDALPVSCPALNTPADGRKFGSKYLVDHEVHFTCNPGFRLVGPSSVVCLPNGTWTGEQPHCRGISECSSQPCQNGGTCVEGVNQYRCICPPGRTGNRCQHQAQTAAPEGSVAGDSAFSRAPRCAQVERAQHCSCEAGFHLSGAAGDSVCQDVNECELYGQEGRPRLCMHACVNTPGSYRCTCPGGYRTLADGKSCEDVDECVGLQPVCPQGTTCINTGGSFQCVSPECPEGSGNVSYVKTSPFQCERNPCPMDSRPCRHLPKTISFHYLSLPSNLKTPITLFRMATASAPGRAGPNSLRFGIVGGNSRGHFVMQRSDRQTGDLILVQNLEGPQTLEVDVDMSEYLDRSFQANHVSKVTIFVSPYDF

SEQ ID NO: 629 - protein, 32 aa, Homo sapiens
WNPISMKNKLKILKIKKKKKKKKKKKKKKGRP

SEQ ID NO: 630 - protein, 15 aa, Homo sapiens
PAPLPLRWSPAGPGQ

SEQ ID NO: 631 - protein, 44 aa, Homo sapiens
MAPACQILRWALALGLGLMFEVTHAFRSQGRGSLVVAVGRERKM

SEQ ID NO: 632 - protein, 44 aa, Homo sapiens; identical to SEQ ID NO: 631

SEQ ID NO: 633 - protein, 42 aa, Homo sapiens
MFKKDLICKRWSFFFWGLLISVVILTSFSNYSRRFYLDLYFS

SEQ ID NO: 634 - protein, 7 aa, Homo sapiens
FIGFILC

SEQ ID NO: 635 - protein, 42 aa, Homo sapiens; identical to SEQ ID NO: 633

SEQ ID NO: 636 - protein, 93 aa, Homo sapiens
  SITE (13): Xaa equals any of the naturally occurring L-amino acids
  SITE (39): Xaa equals any of the naturally occurring L-amino acids
WFQTVDRHCFVLXTDKVKLTWRDRFPAYLTNLVSIIFMXSSRRLRPDEVRGNRKEVIGFSRAWWFTTVIPALWEAEAGRSLEVRSSRPAWPIW

SEQ ID NO: 637 - protein, 35 aa, Homo sapiens [sequence omitted]

SEQ ID NO: 638 - protein, 35 aa, Homo sapiens [sequence omitted]

SEQ ID NO: 639 - protein, 394 aa, Homo sapiens [sequence omitted]

SEQ ID NO: 640 - protein, 49 aa, Homo sapiens
MSPRPLIARCEALGCGARRLPWWALAMALCACGRCVAANSIGETLPSEV

SEQ ID NO: 641 - protein, 49 aa, Homo sapiens; identical to SEQ ID NO: 640

SEQ ID NO: 642 - protein, 85 aa, Homo sapiens
PSVALCWIFFIPLGKWEFFYRPAILLLCQIALYYQDTPMAHFRLTELFLYECTVVIFWAVCEFLVTHPLTTKALSEQYKSIKAQI

SEQ ID NO: 643 - protein, 85 aa, Homo sapiens
  SITE (8): Xaa equals any of the naturally occurring L-amino acids
  SITE (33): Xaa equals any of the naturally occurring L-amino acids
MVGLPAVXQLFWGLCLCTCGLYPAPQSWLSSGXYKVTSGAPSERMWPQRHASGFRLSGRTCLRATAPSPSFPFFSAVINLSACSK

SEQ ID NO: 644 - protein, 54 aa, Homo sapiens
MVGLPAVVQLFWGLCLCTCGAVSCPTELAVQWRIQSDIWCSLRKNVAPEACQWL

SEQ ID NO: 645 - protein, 81 aa, Homo sapiens
  SITE (67): Xaa equals any of the naturally occurring L-amino acids
  SITE (76): Xaa equals any of the naturally occurring L-amino acids
  SITE (81): Xaa equals any of the naturally occurring L-amino acids
MILGIHWGIFLLLLLSWLELQRTVIFFFSPFPIQKHYTLGHFSFSQRRFMDSQTELCATGKVKREKXADEVTWLHXLHHAX

SEQ ID NO: 646 - protein, 73 aa, Homo sapiens
IFLLLLLSWLELQRTVIFFFSPFPIQKHYTLGHFSFSQRRFMDSQTELCATGKVKREKAADEVTWLHVLHHAE

SEQ ID NO: 647 - protein, 9 aa, Homo sapiens
WGLLYLELN

SEQ ID NO: 648 - protein, 81 aa, Homo sapiens
MILGIHWGIFLLLLLSWLELQRTVIFFFSPFPIQKHYTLGHFSFSQRRFMDSQTELCATGKVKREKAADEVTWLHVLHHAE

SEQ ID NO: 649 - protein, 870 aa, Homo sapiens
  SITE (534): Xaa equals any of the naturally occurring L-amino acids
MGPPSLVLCLLSATVFSLLGGSSAFLSHHRLKGRFQRDRRNIRPNIILVLTDDQDVELGSMQVMNKTRRIMEQGGAHFINAFVTTPMCCPSRSSILTGKYVHNHNTYTNNENCSSPSWQAQHESRTFAVYLNSTGYRTAFFGKYLNEYNGSYVPPGWKEWVGLLKNSRFYNYTLCRNGVKEKHGSDYSKDYLTDLITNDSVSFFRTSKKMYPHRPVLMVISHAAPHGPEDSAPQYSRLFPNASQHITPSYNYAPNPDKHWIMRYTGPMKPIHMEFTNMLQRKRLQTLMSVDDSMETIYNMLVETGELDNTYIVYTADHGYHIGQFGLVKGKSMPYEFDIRVPFYVRGPNVEAGCLNPHIVLNIDLAPTILDIAGLDIPADMDGKSILKLLDTERPVNRFHLKKKMRVWRDSFLVERGKLLHKRDNDKVDAQEENFLPKYQRVKDLCQRAEYQTACEQLGQKWQCVEDATGKLKLHKCKGPMRLGGSRALSNLVPKYYGQGSEACTCDSGDYKLSLAGRRKKLFKKKYKASYVRXRSIRSVAIEVDGRVYHVGLGDAAQPRNLTKRHWPGAPEDQDDKDGGDFSGTGGLPDYSAANPIKVTHRCYILENDTVQCDLDLYKSLQAWKDHKLHIDHEIETLQNKIKNLREVRGHLKKKRPEECDCHKISYHTQHKGRLKHRGSSLHPFRKGLQEKDKVWLLREQKRKKKLRKLLKRLQNNDTCSMPGLTCFTHDNQHWQTAPFWTLGPFCACTSANNNTYWCMRTINETHNFLFCEFATGFLEYFDLNTDPYQLMNAVNTLDRDVLNQLHVQLMELRSCKGYKQCNPRTRNMDLGLKDGGSYEQYRQFQRRKWPEMKRPSSKSLGQLWEGWEG

SEQ ID NO: 650 - protein, 870 aa, Homo sapiens
MGPPSLVLCLLSATVFSLLGGSSAFLSHHRLKGRFQRDRRNIRPNIILVLTDDQDVELGSMQVMNKTRRIMEQGGAHFINAFVTTPMCCPSRSSILTGKYVHNHNTYTNNENCSSPSWQAQHESRTFAVYLNSTGYRTAFFGKYLNEYNGSYVPPGWKEWVGLLKNSRFYNYTLCRNGVKEKHGSDYSKDYLTDLITNDSVSFFRTSKKMYPHRPVLMVISHAAPHGPEDSAPQYSRLFPNASQHITPSYNYAPNPDKHWIMRYTGPMKPIHMEFTNMLQRKRLQTLMSVDDSMETIYNMLVETGELDNTYIVYTADHGYHIGQFGLVKGKSMPYEFDIRVPFYVRGPNVEAGCLNPHIVLNIDLAPTILDIAGLDIPADMDGKSILKLLDTERPVNRFHLKKKMRVWRDSFLVERGKLLHKRDNDKVDAQEENFLPKYQRVKDLCQRAEYQTACEQLGQKWQCVEDATGKLKLHKCKGPMRLGGSRALSNLVPKYYGQGSEACTCDSGDYKLSLAGRRKKLFKKKYKASYVRSRSIRSVAIEVDGRVYHVGLGDAAQPRNLTKRHWPGAPEDQDDKDGGDFSGTGGLPDYSAANPIKVTHRCYILENDTVQCDLDLYKSLQAWKDHKLHIDHEIETLQNKIKNLREVRGHLKKKRPEECDCHKISYHTQHKGRLKHRGSSLHPFRKGLQEKDKVWLLREQKRKKKLRKLLKRLQNNDTCSMPGLTCFTHDNQHWQTAPFWTLGPFCACTSANNNTYWCMRTINETHNFLFCEFATGFLEYFDLNTDPYQLMNAVNTLDRDVLNQLHVQLMELRSCKGYKQCNPRTRNMDLGLKDGGSYEQYRQFQRRKWPEMKRPSSKSLGQLWEGWEG

SEQ ID NO: 651 - protein, 204 aa, Homo sapiens
MMPLLSLIFSALFILFGTVIVQAFSDSNDERESSPPEKEEAQEKTGKTEPSFTKENSSKIPKKGFVEVTELTDVTYTSNLVRLRPGHMNVVLILSNSTKTSLLQKFALEVYTFTGSSCLHFSFLSLDKHREWLEYLLEFAQDAAPIPNQYDKHFMERDYTGYVLALNGHKKYFCLFKPQKTVEEEEAIGSCSDVDSSLYLGESR

SEQ ID NO: 652 - protein, 332 aa, Homo sapiens
  SITE (204): Xaa equals any of the naturally occurring L-amino acids
  SITE (283): Xaa equals any of the naturally occurring L-amino acids
  SITE (305): Xaa equals any of the naturally occurring L-amino acids
MEVRKLSISWQFLIVLVLILQILSALDFDPYRVLGVSRTASQADIKKAYKKLAREWHPDKNKDPGAEDKFIQISKAYEILSNEEKRSNYDQYGDAGENQGYQKQQQQREYRFRHFHENFYFDESFFHFPFNSERRDSIDEKYLLHFSHYVNEVVPDSFKKPYLIKITSDWCFSCIHIEPVWKEVIQELEELGVGIGVVHAGYEXRLAHHLGAHSTPSILGIINGKISFFHNAVVRENLRQFVESLLPGNLVEKVTNKNYVRFLSGWQQENKPHVLLFDQTPIXPLLYKLTAFAYKDYLSFGYVYXGLRGTEEMTRRYNINIYAPTLLALKNI

SEQ ID NO: 653 - protein, 737 aa, Homo sapiens
MEVRKLSISWQFLIVLVLILQILSALDFDPYRVLGVSRTASQADIKKAYKKLAREWHPDKNKDPGAEDKFIQISKAYEILSNEEKRSNYDQYGDAGENQGYQKQQQQREYRFRHFHENFYFDESFFHFPFNSERRDSIDEKYLLHFSHYVNEVVPDSFKKPYLIKITSDWCFSCIHIEPVWKEVIQELEELGVGIGVVHAGYERRLAHHLGAHSTPSILGIINGKISFFHNAVVRENLRQFVESLLPGNLVEKVTNKNYVRFLSGWQQENKPHVLLFDQTPIVPLLYKLTAFAYKDYLSFGYVYVGLRGTEEMTRRYNINIYAPTLLVFKEHINRPADVIQARGMKKQIIDDFITRNKYLLAARLTSQKLFHELCPVKRSHRQRKYCVVLLTAETTKLSKPFEAFLSFALANTQDTVRFVHVYSNRQQEFADTLLPDSEAFQGKSAVSILERRNTAGRVVYKTLEDPWIGSESDKFILLGYLDQLRKDPALLSSEAVLPDLTDELAPVFLLRWFYSASDYISDCWDSIFHNNWREMMPLLSLIFSALFILFGTVIVQAFSDSNDERESSPPEKEEAQEKTGKTEPSFTKENSSKIPKKGFVEVTELTDVTYTSNLVRLRPGHMNVVLILSNSTKTSLLQKFALEVYTFTGSSCLHFSFLSLDKHREWLEYLLEFAQDAAPIPNQYDKHFMERDYTGYVLALNGHKKYFCLFKPQKTVEEEEAIGSCSDVDSSLYLGE

SEQ ID NO: 654 - protein, 42 aa, Homo sapiens
MNSSFFISLPALIWSVCLILGWWQVSSGKVAHCGFIFCFPNN

SEQ ID NO: 655 - protein, 111 aa, Homo sapiens
CGSHRMSWKMYCPLHFSGRVCEELKFFFSFFFFLRRSLTPAQATAGDSVSKKQREERKKEKKEGRRKEGRNEGTKEGRKRKEGRKKERERERKKERKKERKKEKKKKKTGT

SEQ ID NO: 656 - protein, 42 aa, Homo sapiens; identical to SEQ ID NO: 654

SEQ ID NO: 657 - protein, 128 aa, Homo sapiens
  SITE (67): Xaa equals any of the naturally occurring L-amino acids
  SITE (68): Xaa equals any of the naturally occurring L-amino acids
  SITE (70): Xaa equals any of the naturally occurring L-amino acids
  SITE (96): Xaa equals any of the naturally occurring L-amino acids
MPVFVCSIGLCFLFSILLLFPPFQFSYICWLSQASVYSPSPSLSNLEVLLCLSILLMIIFPFLISIXXIXSIGRLSTHMGAHTHTHTHTHTHTHTXVCYWPLLLISQENEPFRMFLPLHSALTQNFCS

SEQ ID NO: 658 - protein, 128 aa, Homo sapiens
MPVFVCSIGLCFLFSILLLFPPFQFSYICWLSQASVYSPSPSLSNLEVLLCLSILLMIIFPFLISIIHIFSIGRLSTHMGAHTHTHTHTHTHTHTQVCYWPLLLISQENEPFRMFLPLHSALTQNFCS

SEQ ID NO: 659 - protein, 24 aa, Homo sapiens
  SITE (9): Xaa equals any of the naturally occurring L-amino acids
  SITE (18): Xaa equals any of the naturally occurring L-amino acids
MSWRVWALXFFPAVCVCXCVCVYT

SEQ ID NO: 660 - protein, 65 aa, Homo sapiens
VLMRSDGFIRGFSPFCWALLLLPPREEGCVCFPFCHDCKFPVASPSLRNCESIKALFFIKKKKKN

SEQ ID NO: 661 - protein, 38 aa, Homo sapiens
MSWRVWALLFFPAVCVCVCVCVCACTRTRVCDETIKLV

SEQ ID NO: 662 - protein, 37 aa, Homo sapiens
MVESPVCGLLEGWFFLLFSLAFLSTHLFSEASPLSIL

SEQ ID NO: 663 - protein, 37 aa, Homo sapiens; identical to SEQ ID NO: 662

SEQ ID NO: 664 - protein, 58 aa, Homo sapiens
MTLSVLQHFFICVLLILLLDTNLCRQISSHSFEFSGNQPLVFCCISSISAKLVLDQAG

SEQ ID NO: 665 - protein, 2 aa, Homo sapiens
LE

SEQ ID NO: 666 - protein, 58 aa, Homo sapiens; identical to SEQ ID NO: 664

SEQ ID NO: 667 - protein, 124 aa, Homo sapiens
  SITE (89): Xaa equals any of the naturally occurring L-amino acids
  SITE (103): Xaa equals any of the naturally occurring L-amino acids
  SITE (104): Xaa equals any of the naturally occurring L-amino acids
  SITE (113): Xaa equals any of the naturally occurring L-amino acids
  SITE (121): Xaa equals any of the naturally occurring L-amino acids
VAQVQVPGGHIGLGYLARIDFHRRDGTGGIPARIDGGEIDVALLPGQAVDHIMARACGGEHLAEVGRGTVQGLLGRAVLAAQARRAPPXQPLPATMGFWGWKXXPNRGLWFKXWKPPFGAXGVP

SEQ ID NO: 668 - protein, 283 aa, Homo sapiens
  SITE (174): Xaa equals any of the naturally occurring L-amino acids
  SITE (189): Xaa equals any of the naturally occurring L-amino acids
  SITE (205): Xaa equals any of the naturally occurring L-amino acids
MKIVPLTAAVLALVLAPAAHAQPANKATTVSPTAAAFLAQFATEGNDSVSWAQFEAFRKQRYADTDRNQDGHVDEQEYVDEYLQRFDVRLADARAGHLRQTDTRFKALDRDGNGAISRAEYDAAGERTWAGYERSQNATQETAAASSRDPLKMPTSHTANGMLDLYDRNKDGAXDREEFDAVRAASFAXTDTDGNGTLSLAEYTXEFEGRLDQQRQRVRADAERQARVRFASLDKDTDGRMTFAEYQLSGKRMFDRADSNGDGVVDARDPEPVAGAHSANGNR

SEQ ID NO: 669 - protein, 283 aa, Homo sapiens
MKIVPLTAAVLALVLAPAAHAQPANKATTVSPTAAAFLAQFATEGNDSVSWAQFEAFRKQRYADTDRNQDGHVDEQEYVDEYLQRFDVRLADARAGHLRQTDTRFKALDRDGNGAISRAEYDAAGERTWAGYERSQNATQETAAASSRDPLKMPTSHTANGMLDLYDRNKDGAVDREEFDAVRAASFAATDTDGNGTLSLAEYTAEFEGRLDQQRQRVRADAERQARVRFASLDKDTDGRMTFAEYQLSGKRMFDRADSNGDGVVDARDPEPVAGAHSANGNR

SEQ ID NO: 670 - protein, 86 aa, Homo sapiens
  SITE (4): Xaa equals any of the naturally occurring L-amino acids
  SITE (11): Xaa equals any of the naturally occurring L-amino acids
NLWXAHFFLNXSSIQIEYPPLSKMLETPKGKGWFFGEFFFWVFLFFLGFAFGFWNSLFVLYLFVGHPKSEICSKIQNVKCSSEHFL

SEQ ID NO: 671 - protein, 57 aa, Homo sapiens
MGLLPGWLLLWARLKCFCAVGLGSLAAVYGRGPGLPQDQLDCVLWDCGTLGLYRGQF

SEQ ID NO: 672 - protein, 12 aa, Homo sapiens
  SITE (8): Xaa equals any of the naturally occurring L-amino acids
LFSGWLVXLCGV

SEQ ID NO: 673 - protein, 48 aa, Homo sapiens
  SITE (31): Xaa equals any of the naturally occurring L-amino acids
MGETLVSVFLKPPALTWLLRAICLMVQTWAXGQRSWPQSLALPCYLNR

SEQ ID NO: 674 - protein, 29 aa, Homo sapiens
  SITE (3): Xaa equals any of the naturally occurring L-amino acids
  SITE (13): Xaa equals any of the naturally occurring L-amino acids
  SITE (17): Xaa equals any of the naturally occurring L-amino acids
  SITE (19): Xaa equals any of the naturally occurring L-amino acids
  SITE (23): Xaa equals any of the naturally occurring L-amino acids
MLXSNSFSPSLSXYLCXLXFSLXSSKSSK

SEQ ID NO: 675 - protein, 29 aa, Homo sapiens [sequence omitted]

SEQ ID NO: 676 - protein, 57 aa, Homo sapiens
MPPHRQTDGQMGLPAPALWVWGLLLSSSFQTLLPAFPKPPALNLGCSTRPIPSFLKI

SEQ ID NO: 677 - protein, 93 aa, Homo sapiens
  SITE (24): Xaa equals any of the naturally occurring L-amino acids
  SITE (65): Xaa equals any of the naturally occurring L-amino acids
QVSLPTRLLQMPGMGLDSRFQAWXPSPYLGPQPRAPRPGLQPGPSLRGAEFRESCPRSQKRGREXGRPCPGCRPGGWGLPARLGQPQLQTGPG

SEQ ID NO: 678 - protein, 57 aa, Homo sapiens; identical to SEQ ID NO: 676

SEQ ID NO: 679 - protein, 25 aa, Homo sapiens
  SITE (13): Xaa equals any of the naturally occurring L-amino acids
MVGRCSILSSTPXRHPSLSWEGLGG

SEQ ID NO: 680 - protein, 25 aa, Homo sapiens
MVGRCSILSSTPQRHPSLSWEGLGG

SEQ ID NO: 681 - protein, 18 aa, Homo sapiens
  SITE (13): Xaa equals any of the naturally occurring L-amino acids
MGTQGCPHPSWLXLLGLS

SEQ ID NO: 682 - protein, 30 aa, Homo sapiens
MGTQGCPHPSWLLLLGLSWWGEGDGAVGPC

SEQ ID NO: 683 - protein, 10 aa, Homo sapiens
SLLELGLGPL

SEQ ID NO: 684 - protein, 206 aa, Homo sapiens
  SITE (2): Xaa equals any of the naturally occurring L-amino acids
  SITE (3): Xaa equals any of the naturally occurring L-amino acids
  SITE (41): Xaa equals any of the naturally occurring L-amino acids
DXXPGAYAGFRPNANRISFPVFRNNVCPWPEALRSAPKLLXLDEPMGALDKKLRDRMQLEVVDILERVGVTCVMVTHDQEEAMTMAGRIAIMNRGKFVQIGEPEEIYEHPTTRYSAEFIGSVNVFEGVLKERQEDGLVLDSPGLVHPLKVDADASVVDNVPVHVALRPEKIMLCEEPPANGCNFAVGEVIHIAYLGDLSVYHVRLK

SEQ ID NO: 685 - protein, 440 aa, Homo sapiens
  SITE (168): Xaa equals any of the naturally occurring L-amino acids
  SITE (169): Xaa equals any of the naturally occurring L-amino acids
  SITE (173): Xaa equals any of the naturally occurring L-amino acids
  SITE (180): Xaa equals any of the naturally occurring L-amino acids
  SITE (191): Xaa equals any of the naturally occurring L-amino acids
MASLVSLELGLLLAVLVVTATASPPAGLLSLLTSGQGALDQEALGGLLNTLADRVHCANGPCGKCLSVEDALGLGEPEGSGLPPGPVLEARYVARLSAAAVLYLSNPEGTCEDARAGLWASHADHLLALLESPKALTPGLSWLLQRMQARAAGQTPKTACVDIPQLLXXAVGXGAPGSAXGVLAALLDHVXSGSCFHALPSPQYFVDFVFQQHSSEVPMTLAELSALMQRLGVGREAHSDHSHRHRGASSRDPVPLISSSNSSSVWDTVCLSARDVMAAYGLSEQAGVTPEAWAQLSPALLQQQLSGACTSQSRPPVQDQLSQSERYLYGSLATLLICLCAVFGLLLLTCTGCRGVTHYILQTFLSLAVGALTGDAVLHLTPKVLGLHTHSEEGLSPQPTWRLLAMLAGLYAFFLFENLFNLLLPRDPEDLEDGPAATAA

SEQ ID NO: 686 - protein, 647 aa, Homo sapiens
MASLVSLELGLLLAVLVVTATASPPAGLLSLLTSGQGALDQEALGGLLNTLADRVHCANGPCGKCLSVEDALGLGEPEGSGLPPGPVLEARYVARLSAAAVLYLSNPEGTCEDARAGLWASHADHLLALLESPKALTPGLSWLLQRMQARAAGQTPKTACVDIPQLLEEAVGAGAPGSAGGVLAALLDHVRSGSCFHALPSPQYFVDFVFQQHSSEVPMTLAELSALMQRLGVGREAHSDHSHRHRGASSRDPVPLISSSNSSSVWDTVCLSARDVMAAYGLSEQAGVTPEAWAQLSPALLQQQLSGACTSQSRPPVQDQLSQSERYLYGSLATLLICLCAVFGLLLLTCTGCRGVTHYILQTFLSLAVGALTGDAVLHLTPKVLGLHTHSEEGLSPQPTWRLLAMLAGLYAFFLFENLFNLLLPRDPEDLEDGPCGHSSHSHGGHSHGVSLQLAPSELRQPKPPHEGSRADLVAEESPELLNPEPRRLSPELRLLPYMITLGDAVHNFADGLAVGAAFASSWKTGLATSLAVFCHELPHELGDFAALLHAGLSVRQALLLNLASALTAFAGLYVALAVGVSEESEAWILAVATGLFLYVALCDMLPAMLKVRDPRPWLLFLLHNVGLLGGWTVLLLLSLYEDDITF

SEQ ID NO: 687 - protein, 49 aa, Homo sapiens
  SITE (48): Xaa equals any of the naturally occurring L-amino acids
ISVIFNDTVKKTMQECSAMKQIFKDLFTGFLSWNIHLFPRCLCDSEIXP

SEQ ID NO: 688 - protein, 307 aa, Homo sapiens
  SITE (249): Xaa equals any of the naturally occurring L-amino acids
  SITE (261): Xaa equals any of the naturally occurring L-amino acids
MLRVVEGIFIFVVVSESVFGVLGNGFIGLVNCIDCAKNKLSTIGFILTGLAISRIFLIWIIITDGFIQIFSPNIYASGNLIEYISYFWVIGNQSSMWFATSLSIFYFLKIANFSNYIFLWLKSRTNMVLPFMIVFLLISSLLNFAYIAKILNDYKMKNDTVWDLNMYKSEYFIKQILLNLGVIFFFTLSLITCIFLIISLWRHNRQMQSNVTGLRDSNTEAHVKAMKVLISFIILFILYFIGMAIEISXFTVRENKLLLMXGMTTTAIYPWGHSFILILGNSKLKQASLRVLQQLKCCEKRKNLRVT

SEQ ID NO: 689 - protein, 181 aa, Homo sapiens
MVLPFMIVFLLISSLLNFAYIAKILNDYKMKNDTVWDLNMYKSEYFIKQILLNLGVIFFFTLSLITCIFLIISLWRHNRQMQSNVTGLRDSNTEAHVKAMKVLISFIILFILYFIGMAIEISCFTVRENKLLLMFGMTTTAIYPWGHSFILILGNSKLKQASLRVLQQLKCCEKRKNLRVT

SEQ ID NO: 690 - protein, 70 aa, Homo sapiens
AAMRRWASSSLEGEELSTQRDLTRKVHPPSTQEAPADSMCFRLCWPNGLCRDYSALPLWLQSDHRPSESE

SEQ ID NO: 691 - protein, 88 aa, Homo sapiens
  SITE (63): Xaa equals any of the naturally occurring L-amino acids
  SITE (73): Xaa equals any of the naturally occurring L-amino acids
MPVGSLPHPGCLWAAFLTLDACGLPSSPWMPVGSLPHPGCLWAAFLTLDACGQPSSPWMPVGXLLTLDACGQXSSPGCLWAAFLTWSL

SEQ ID NO: 692 - protein, 190 aa, Homo sapiens [sequence omitted]

SEQ ID NO: 693 - protein, 38 aa, Homo sapiens
MWLSPVPGVCAAVLALSFWIAKFPGEGTAIAKALGRLK

SEQ ID NO: 694 - protein, 38 aa, Homo sapiens; identical to SEQ ID NO: 693

SEQ ID NO: 695 - protein, 26 aa, Homo sapiens
GLFLGQMNWIFSCCFSNNVTTTVKKR

SEQ ID NO: 696 - protein, 166 aa, Homo sapiens [sequence omitted]

SEQ ID NO: 697 - protein, 166 aa, Homo sapiens [sequence omitted]

SEQ ID NO: 698 - protein, 61 aa, Homo sapiens
MVLINSGKPGSKCCWVFRPGLSAPCSALWWGCPGLALSLSGPQVRLFTRRYETTLPNTGPW

SEQ ID NO: 699 - protein, 54 aa, Homo sapiens
MLLGLQARLVSSLLCSVVGCLGCSFFCPRRYYKKLNLHKACMENSVSAEIRSDR

SEQ ID NO: 700 - protein, 240 aa, Homo sapiens
MSRYLLPLSALGTVAGAAVLLKDYVTGGACPSKATIPGKTVIVTGANTGIGKQTALELARRGGNIILACRDMEKCEAAAKDIRGETLNHHVNARHLDLASLKSIREFAAKIIEEEERVDILINNAGVMRCPHWTTEDGFEMQFGVNHLGHFLLTNLLLDKLKASAPSRIINLSSLAHVAGHIDFDDLNWQTRKYNTKAAYCQSKLAIVLFTKELSRRLQGTGALGSASLLLYSEPRAAFP

SEQ ID NO: 701 - protein, 246 aa, Homo sapiens
  SITE (222): Xaa equals any of the naturally occurring L-amino acids
  SITE (223): Xaa equals any of the naturally occurring L-amino acids
  SITE (236): Xaa equals any of the naturally occurring L-amino acids
  SITE (242): Xaa equals any of the naturally occurring L-amino acids
  SITE (244): Xaa equals any of the naturally occurring L-amino acids
MGAAVFFGCTFVAFGPAFALFLITVAGDPLRVIILVAGAFFWLVSLLLASVVWFILVHVTDRSDARLQYGLLIFGAAVSVLLQEVFRFAYYKLLKKADEGLASLSEDGRSPISIRQMAYVSGLSFGIISGVFSVINILADALGPGVVGIHGDSPYYFLTSAFLTAAIILLHTFWGVVFFDACERRRYWALGLVVGSHLLTSGLTFLNPWYEASLLPSMQSLXXWGSGPSSQLEGPXKYSAQXLXKD

SEQ ID NO: 702 - protein, 5 aa, Homo sapiens
GEIFL

SEQ ID NO: 703 - protein, 84 aa, Homo sapiens
KMHFNKNKSILKSFSFVRGNMNEIHSYLKTEYFTAKTLNISRAYHILNTLWSCSYFNIPGSGGQLACLWLRICFHACFLSFFYL

SEQ ID NO: 704 - protein, 5 aa, Homo sapiens
VLLIL

SEQ ID NO: 705 - protein, 266 aa, Homo sapiens
  SITE (45): Xaa equals any of the naturally occurring L-amino acids
  SITE (47): Xaa equals any of the naturally occurring L-amino acids
  SITE (51): Xaa equals any of the naturally occurring L-amino acids
  SITE (134): Xaa equals any of the naturally occurring L-amino acids
  SITE (183): Xaa equals any of the naturally occurring L-amino acids
  SITE (222): Xaa equals any of the naturally occurring L-amino acids
  SITE (224): Xaa equals any of the naturally occurring L-amino acids
  SITE (255): Xaa equals any of the naturally occurring L-amino acids
MPRHLSGLLLLLWPLLLLLPPTPAAPGPLARPGLRRLGTRGPGGXPXRRPXSAVPTRAPYSGAGQPGGARGAGVCRSRPLDLVFIIDSSRSVRPLEFTKVKTFVSQIIDTLDIGAADTRVAVVNYASTVKIEFXLQTHSDKQSLKQAVARITPLSTGTMSGLAIQTAMDEAFTVEAGARGPTXNIPKVAIIVTDGRPQDQVNEVAARARASGIELYAVGVDXAXMESLQDEWPAKPLDEHVFYVETYGVIEKPSXRFQETLLRSWN

SEQ ID NO: 706 - protein, 484 aa, Homo sapiens
MPRHLSGLLLLLWPLLLLLPPTPAAPGPLARPGLRRLGTRGPGGSPGRRPGSAVPTRAPYSGAGQPGGARGAGVCRSRPLDLVFIIDSSRSVRPLEFTKVKTFVSQIIDTLDIGAADTRVAVVNYASTVKIEFHLQTHSDKQSLKQAVARITPLSTGTMSGLAIQTAMDEAFTVEAGARGPTSNIPKVAIIVTDGRPQDQVNEVAARARASGIELYAVGVDRADMESLKMMASEPLDEHVFYVETYGVIEKLSSRFQETFCALDPCVLGTHRCQHVCVSDGEGKHHCECSQGYSLNADQKTCSAIDKCALNTHGCEHICVNDRTGSYHCECYEGYTLNQDRKTCSAQDQCAFGTHGCQHICVNDRDGSHHCECYEGYTLNADNKTCSVRSECAGGSHGCQHLCVDDGPAAYHCDCFPGYTLTEDRRTCAAIEEARRLVSTEDACGCEATLAFQERASSYLQRLNAKLDDILGKLQADAYGQIHR

SEQ ID NO: 707 - protein, 368 aa, Homo sapiens
  SITE (310): Xaa equals any of the naturally occurring L-amino acids
  SITE (365): Xaa equals any of the naturally occurring L-amino acids
MQPSSLLPLALCLLAAPASALVRIPLHKFTSIRRTMSEVGGSVEDLIAKGPVSKYSQAVPAVTEGPIPEVLKNYMDAQYYGEIGIGTPPQCFTVVFDTGSSNLWVPSIHCKLLDIACWIHHKYNSDKSSTYVKNGTSFDIHYGSGSLSGYLSQDTVSVPCQSASSASALGGVKVERQVFGEATKQPGITFIAAKFDGILGMAYPRISVNNVLPVFDNLMQQKLVDQNIFSFYLSRDPDAQPGGELMLGGTDSKYYKGSLSYLNVTRKAYWQVHLDQVEVASGLTLCKEGCEAIVDTGTSLMVGPVDEVRXLQKAIGAVPLIQGEYMIPCEKVSTLPAITLKLGGKGYKLSPEDYTLKVSQAGKTXCLS

SEQ ID NO: 708 - protein, 92 aa, Homo sapiens
  SITE (43): Xaa equals any of the naturally occurring L-amino acids
  SITE (69): Xaa equals any of the naturally occurring L-amino acids
  SITE (70): Xaa equals any of the naturally occurring L-amino acids
LVVLGVCAAQHELTPRLRAGVPVQVEREDVLLHQLLLHQVIKXGKHIVDRDAGVGHAQDAVELGRDEGXXRLLGGFPERLPLHLDASQARQT

SEQ ID NO: 709 - protein, 115 aa, Homo sapiens
  SITE (50): Xaa equals any of the naturally occurring L-amino acids
  SITE (70): Xaa equals any of the naturally occurring L-amino acids
  SITE (86): Xaa equals any of the naturally occurring L-amino acids
  SITE (100): Xaa equals any of the naturally occurring L-amino acids
MQPPSLLLLVLGLLAAPAAALVRIPLHKFTSVRRTMSELGGPVEDLIARXPISKYAQGVPSVAGGPVPEXLKETTWNAQILRGKFXHPGTPPRKLLPPVXPFEKRGSFPTLLGSP

SEQ ID NO: 710 - protein, 410 aa, Homo sapiens
MQPPSLLLLVLGLLAAPAAALVRIPLHKFTSVRRTMSELGGPVEDLIARGPISKYAQGVPSVAGGPVPEVLRNYMDAQYYGEIGIGTPPQCFTVVFDTGSSNLWVPSIHCKLLDIACWIHHKYNSGKSSTYVKNGTSFDIHYGSGSLSGYLSQDTVSVPCKSGLSSLAGVKVERQTFGEATKQPGITFIAAKFDGILGMAYPRISVNNVLPVFDNLMQQKLVEKNIFSFYLNRDPGAQPGGELMLGGTDSKYYKGPLSYLNVTRKAYWQVHMEQVDVGSSLTLCKGGCEAIVDTGTSLIVGPVDEVRELQKAIGAVPLIQGEYMIPCEKVSTLPEVTLTLGGKPYKLSSEDYTLKVSQGGKSICLSGFMGMDIPPPGGPLWILGDVFIGRYYTVFDRDQNRVGLAEATRL

SEQ ID NO: 711 - protein, 96 aa, Homo sapiens
  SITE (25): Xaa equals any of the naturally occurring L-amino acids
  SITE (77): Xaa equals any of the naturally occurring L-amino acids
  SITE (79): Xaa equals any of the naturally occurring L-amino acids
AAREGAPPPCPTSAIGRASLSLRDXGRGLRDARREKRRGVRGQDGGDYGWCGPARGRGVAAKGTAEGPTGENRAQGXKXGVRVAVEASSVRGPGRA

SEQ ID NO: 712 - protein, 453 aa, Homo sapiens
  SITE (432): Xaa equals any of the naturally occurring L-amino acids
MRMASIMVWVMIIMVILVLGYGIFHCYMEYSRLRGEAGSDVSLVDLGFQTDFRVYLHLRQTWLAFMIILSILEVIIILLLIFLRKRILIAIALIKEASRAVGYVMCSLLYPLVTFFLLCLCIAYWASTAVFLSTSNEAVYKIFDDSPCPFTAKTCNPETFPSSNESRQCPNARCQFAFYGGESGYHRALLGLQIFNAFMFFWLANFVLALGQVTLAGAFASYYWALRKPDDLPAFPLFSAFGRALRYHTGSLAFGALILAIVQIIRVILEYLDQRLKAAENKFAKCLMTCLKCCFWCLEKFIKFLNRNAYIMIAIYGTNFCTSARNAFFLLMRNIIRVAVLDKVTDFLFLLGKLLIVGSVGILAFFFFTHRIRIVQDTAPPLNYYWVPILTVIVGSYLIAHGFFSVYGMCVDTLFLCFLEDLERNDGSAERXYFMSSTLKKLLNKTNKKAAES

SEQ ID NO: 713 - protein, 453 aa, Homo sapiens
MRMASIMVWVMIIMVILVLGYGIFHCYMEYSRLRGEAGSDVSLVDLGFQTDFRVYLHLRQTWLAFMIILSILEVIIILLLIFLRKRILIAIALIKEASRAVGYVMCSLLYPLVTFFLLCLCIAYWASTAVFLSTSNEAVYKIFDDSPCPFTAKTCNPETFPSSNESRQCPNARCQFAFYGGESGYHRALLGLQIFNAFMFFWLANFVLALGQVTLAGAFASYYWALRKPDDLPAFPLFSAFGRALRYHTGSLAFGALILAIVQIIRVILEYLDQRLKAAENKFAKCLMTCLKCCFWCLEKFIKFLNRNAYIMIAIYGTNFCTSARNAFFLLMRNIIRVAVLDKVTDFLFLLGKLLIVGSVGILAFFFFTHRIRIVQDTAPPLNYYWVPILTVIVGSYLIAHGFFSVYGMCVDTLFLCFLEDLERNDGSAERPYFMSSTLKKLLNKTNKKAAES

SEQ ID NO: 714 - protein, 84 aa, Homo sapiens
  SITE (56): Xaa equals any of the naturally occurring L-amino acids
GRPTRPLSAQNASVNFWEASTLAAQRELAMQFLCPGNHCFPCHLLCAQKRYNSHQXTPVVTAHLVCCVFQQSVLLGVQLNRLGV

SEQ ID NO: 715 - protein, 32 aa, Homo sapiens
MWWALLACRFCCPRRCASAWQGLPRRGALFSG

SEQ ID NO: 716 - protein, 53 aa, Homo sapiens
  SITE (26): Xaa equals any of the naturally occurring L-amino acids
MWWALLALPFLLPTALRLCLAGLPHXFRHTNRMVPQWHQSGDRPLHSHPHSRF

SEQ ID NO: 717 - protein, 744 aa, Homo sapiens
MWWALLALPFLLPTALRLCLAGPPPERGPLFWLTRQDSRESGAANATVSPCEGLPSAGASTLTLANRSLERLPNCLPPALRSLDASHNLLRALSAPELGALPRLQALTLRHNRIAELRWGPGGPAALHTLDLSYNQLATLPPCAGPALPGLRSLALAGNPLQALQPGAFACLPALRLLNLSGTALGRDLGAGIADGAFAGAGGALEVLDLSGTFLERVRSGWIRDLPKLTSLHLRKMPRLRILEAAVFKMTPNLQQLDCQDSSALTSVHTQLFQDTPRLQVLLFQNCNLSSFPPWSLHSSQVLSISLFGNPLICSCELSWLLRDAKRTVLSRAADTVCVPASGSRDTFSAPLSLSQLPTVCHLDQSTTLHSSSPQAVPFTHQPSTQGLTTPWSTAPSTRPVEAEQSVTKPLSFPTDSATQTAWSHSGIKVGTARSTAIPTADSSTSSAPRRAANTAGAEHQEHAPMLVHAPHVSAASTPSASKHPGLFPTPWSQVRTPQPDYRAQATLQAPHPSPSEGAIPVLLLDESSEEEEEGQKEEVGAPPQDVPCDYHPCKHLQTPCAELQRRSRCRCPGLSGEDSLPDPPRLQAVTETTDTSALVRWCAPNSVVHGYQIHYSPEGWAENQSVTVVADIYATARQHPLYGLSPGTMYRVCVLAANRAGLSQPVQASGWTRACAAFTTKPSFVLVFAGLCAACGLLLVTTLLLAACLCRRSRTVRLQRYNTHLVAYKNPAFDYPLKLQTLS

SEQ ID NO: 718 - protein, 153 aa, Homo sapiens
AIHFTQQDMPQIRRQIYKELCHANSLCERRIPGLKPMVKGMGTWGTLPSRETPVPLLPLPLPVPYGFSYLNVLIDFCIFFSLREYLLIFDVQGVAMEQPLLPLLGRSLALWPGWGGHPPSRVQGRGQEHLCWGGGRAKGVCLPDIQTLFYTYI

SEQ ID NO: 719 - protein, 46 aa, Homo sapiens
MRMKMRKRKWQLGGCPPDGVSWELPSGLVLPALLIEKPAPSAAAEP

SEQ ID NO: 720 - protein, 99 aa, Homo sapiens
GVSWEGTPMSPFPFMGLGSGVRGSHSEFAVTQLLVDLPTKFGHVLLGEAEWLRQGQMLAVLQHKSTTVTVIILPGHIHFEVTFPALVEIQSVFLYRLCL

SEQ ID NO: 721 - protein, 90 aa, Homo sapiens
MDYGGLQSLLWTLTLASSPVLFPMALGDPPGQKGSGVWHPLMPASSSAMCAASGTMWPRSYFRAQIWAPQKRQSGPGRKPASTAPCGRSM

SEQ ID NO: 722 - protein, 288 aa, Homo sapiens
  SITE (10): Xaa equals any of the naturally occurring L-amino acids
  SITE (15): Xaa equals any of the naturally occurring L-amino acids
  SITE (268): Xaa equals any of the naturally occurring L-amino acids
  SITE (271): Xaa equals any of the naturally occurring L-amino acids
  SITE (273): Xaa equals any of the naturally occurring L-amino acids
  SITE (274): Xaa equals any of the naturally occurring L-amino acids
  SITE (276): Xaa equals any of the naturally occurring L-amino acids
  SITE (286): Xaa equals any of the naturally occurring L-amino acids
FSSSACPSVXSLFVXLGKNPHDAQGHPRASEDQPSSGKPVTSYPGECGFVFTKEASLEIRDMLLANKVPAAARAGAIAPCEVTVPAQNTGLGPEKTSFFQALGITTKISRGTIEILSDVQLIKTGDKVGASEATLLNMLNISPFSFGLIIQQVFDNGSIYNPEVLDITEETLHSRFLEGVRNVASVCLQIGYPTVASVPHSIINGYKRVLALSVETDYTFPLAEKVKAFLADPSAFVAAAPVAAATTAAPAAAAAPAKVEAKEESEEXDEXIXXSXISKSNNSSQXIV

SEQ ID NO: 723 - protein, 112 aa, Homo sapiens
  SITE (71): Xaa equals any of the naturally occurring L-amino acids
  SITE (103): Xaa equals any of the naturally occurring L-amino acids
  SITE (112): Xaa equals any of the naturally occurring L-amino acids
MKTLLLLVGLLLTWENGRVLGDQMVSDTELQEMSTEGSKYINREIKNALKGVKQIKTLIEQTNEERKSLLXNLEEAKKKKEDALNDTKDSEMKLKASPGVFNXTLDGPLGGX

SEQ ID NO: 724 - protein, 14 aa, Homo sapiens
LLLVGLQQLVVQAW

SEQ ID NO: 725 - protein, 7 aa, Homo sapiens
LLVVLLS

SEQ ID NO: 726 - protein, 139 aa, Homo sapiens
MKTLLLLVGLLLTWENGRVLGDQMVSDTELQEMSTEGSKYINREIKNALKGVKQIKTLIEQTNEERKSLLTNLEEAKKKKEDALNDTKDSEMKLKASQGVCNDTMMALWEECKPCLKQTWGKGLRPSLQKQHRAGWPPG

SEQ ID NO: 727 - protein, 112 aa, Homo sapiens
  SITE (103): Xaa equals any of the naturally occurring L-amino acids
  SITE (112): Xaa equals any of the naturally occurring L-amino acids
MKTLLLLVGLLLTWENGRVLGDQMVSDTELQEMSTEGSKYINREIKNALKGVKQIKTLIEQTNEERKSLLTNLEEAKKKKEDALNDTKDSEMKLKASPGVFNXTLDGPLGGX

SEQ ID NO: 728 - protein, 6 aa, Homo sapiens
MLLLYL

SEQ ID NO: 729 - protein, 14 aa, Homo sapiens
PQGPNDVTAKLLCP

SEQ ID NO: 730 - protein, 67 aa, Homo sapiens
MAPSGPLLLVLLVPLAAARPGPTSVPAGAAACPCGGTSCRGWGAGPTPGRTSTCPHLTCPRAGTGAT

SEQ ID NO: 731 - protein, 129 aa, Homo sapiens
MAPSGPLLLVLLVPLAAARAGPYFRPGRGCRLPLRGDQLSGLGRRTYPRPHEYLSPSDLPKSWDWRNVNGVNYASATRNQHIPQYCGSCWAHGSTSAMAGPDQHQEKGGVALHPAVRAARPRLRQRGLL

SEQ ID NO: 732 - protein, 208 aa, Homo sapiens
MGLGARGAWAALLLGTLQVLALLGAAHESAAMAASANIENSGLPHNSSANSTETLQHVPSDHTNETSNSTVKPPTSVASDSSNTTVTTMKPTAASNTTTPGMVSTNMTSTTLKSTPKTTSVSQNTSQISTSTMTVTHNSSVTSAASSVTITTTMHSEAKKGSKFDTGSFVGGIVLTLGVLSILYIGCKMYYSRRGIRYRTIDEHDAII

SEQ ID NO: 733 - protein, 208 aa, Homo sapiens; identical to SEQ ID NO: 732

SEQ ID NO: 734 - protein, 208 aa, Homo sapiens; identical to SEQ ID NO: 732

SEQ ID NO: 735 - protein, 208 aa, Homo sapiens; identical to SEQ ID NO: 732

SEQ ID NO: 736 - protein, 365 aa, Homo sapiens
  SITE (144): Xaa equals any of the naturally occurring L-amino acids
  SITE (201): Xaa equals any of the naturally occurring L-amino acids
MFVGLMAFLLSFYLIFTNEGRALKTATSLAEGLSLVVSPDSIHSVAPENEGRLVHIIGALRTSKLLSDPNYGVHLPAVKLRRHVEMYQWVETEESREYTEDGQVKKETRYSYNTEWRSEIINSKNFDREIGHKNPSAMAVESFXATAPFVQIGRFFLSSGLIDKVDNFKSLSLSKLEDPHVDIIRRGDFFYHSENPKYPEXGDLRVSFSYAGLSGDDPDLGPAHVVTVIARQRGDQLVPFSTKSGDTLLLLHHGDFSAEEVFHRELRSNSMKTWGLRAAGWMAMFMGLNLMTRILYTLVDWFPVFRDLVNIGLKAFAFCVATSLTLLTVAAGWLFYRPLWALLIAGLALVPILVARTRVPAKKLE

SEQ ID NO: 737 - protein, 365 aa, Homo sapiens
MFVGLMAFLLSFYLIFTNEGRALKTATSLAEGLSLVVSPDSIHSVAPENEGRLVHIIGALRTSKLLSDPNYGVHLPAVKLRRHVEMYQWVETEESREYTEDGQVKKETRYSYNTEWRSEIINSKNFDREIGHKNPSAMAVESFMATAPFVQIGRFFLSSGLIDKVDNFKSLSLSKLEDPHVDIIRRGDFFYHSENPKYPEVGDLRVSFSYAGLSGDDPDLGPAHVVTVIARQRGDQLVPFSTKSGDTLLLLHHGDFSAEEVFHRELRSNSMKTWGLRAAGWMAMFMGLNLMTRILYTLVDWFPVFRDLVNIGLKAFAFCVATSLTLLTVAAGWLFYRPLWALLIAGLALVPILVARTRVPAKKLE

SEQ ID NO: 738 - protein, 34 aa, Homo sapiens
MLWPCCPSPLPIWASPSPRLTWWCLLSCFGTQGC

SEQ ID NO: 739 - protein, 34 aa, Homo sapiens; identical to SEQ ID NO: 738

SEQ ID NO: 740 - protein, 41 aa, Homo sapiens
MRHCCWLWSSCMLWEPSTTLGSSPRLVERWQSCRWTPCCPK

SEQ ID NO: 741 - protein, 41 aa, Homo sapiens; identical to SEQ ID NO: 740

SEQ ID NO: 742 - protein, 18 aa, Homo sapiens
VHKSAGLLWEATGEGPGS

SEQ ID NO: 743 - protein, 197 aa, Homo sapiens
VEIVHELKGEGKAQRKISAIHILDVLVLNGTDVREQHFNQRIQLAEKFVKAVSKPSRPDMNPIRVKEVYRLEEMEKIFVRLEMKIIKGSSGTPKLSYTGRDDRHFVPMGLYIVRTVNEPWTMGFSKSFKKKFFYNKKTKDSTFDLPADSIAPFHICYYGRLFWEWGDGIRVHDSQKPQDQDKLSKEDVLSFIQMHRA

SEQ ID NO: 744 - protein, 1 aa, Homo sapiens
N

SEQ ID NO: 745 - protein, 61 aa, Homo sapiens
  SITE (58): Xaa equals any of the naturally occurring L-amino acids
MHSKQTLLWKELLLAIPCIIASPRSLWPRWASGKVKDWVNTARVGRTSLRLPVRKVEXAWV

SEQ ID NO: 746 - protein, 61 aa, Homo sapiens
MHSKQTLLWKELLLAIPCIIASPRSLWPRWASGKVKDWVNTARVGRTSLRLPVRKVEEAWV

SEQ ID NO: 747 - protein, 53 aa, Homo sapiens
NYNRGGTFLYQKAKIKHHVLMVFYKSTSNSTESLIWSLLNSWSDKVTFPKRVR

SEQ ID NO: 748 - protein, 56 aa, Homo sapiens
  SITE (35): Xaa equals any of the naturally occurring L-amino acids
  SITE (42): Xaa equals any of the naturally occurring L-amino acids
  SITE (46): Xaa equals any of the naturally occurring L-amino acids
KSQMQSFTIVTAYGRCLSLTCLPTLNQMLVFKSNXSLVSPHXLTFXNIFARFENFQ

SEQ ID NO: 749 - protein, 11 aa, Homo sapiens
FLVCLLLGPRS

SEQ ID NO: 750 - protein, 6 aa, Homo sapiens
TVAIYD

SEQ ID NO: 751 - protein, 46 aa, Homo sapiens
  SITE (45): Xaa equals any of the naturally occurring L-amino acids
INHVFIWGSIAIYFSILFTMHSNGIFGIFPNQFPFVGNARHSLTXK

SEQ ID NO: 752 - protein, 109 aa, Homo sapiens
  SITE (94): Xaa equals any of the naturally occurring L-amino acids
MNTLVLWIFGFLICLGIILAIGNSIWESQTGDQFRTFLFWNEGEKSSVFSGFLTFWSYIIILNTVVPISLYVSVEVIRLGHSYFINWDRKMYYXRKAIPAVARTTTLNE

SEQ ID NO: 753 - protein, 937 aa, Homo sapiens
MQNSGKTKFKRTSIDRLMNTLVLWIFGFLICLGIILAIGNSIWESQTGDQFRTFLFWNEGEKSSVFSGFLTFWSYIIILNTVVPISLYVSVEVIRLGHSYFINWDRKMYYSRKAIPAVARTTTLNEELGQIEYIFSDKTGTLTQNIMTFKRCSINGRIYGEVHDDLDQKTEITQEKEPVDFSVKSQADREFQFFDHNLMESIKMGDPKVHEFLRLLALCHTVMSEENSAGELIYQVQSPDEGALVTAARNFGFIFKSRTPETITIEELGTLVTYQLLAFLDFNNTRKRMSVIVRNPEGQIKLYSKGADTILFEKLHPSNEVLLSLTSDHLSEFAGEGLRTLAIAYRDLDDKYFKEWHKMLEDANVATEERDERIAGLYEEIERDLMLLGATAVEDKLQEGVIETVTSLSLANIKIWVLTGDKQETAINIGYACNMLTDDMNDVFVIAGNNAVEVREELRKAKQNLFGQNRNFSNGHVVCEKKQQLELDSIVEETITGDYALIINGHSLAHALESDVKNDLLELACMCKTVICCRVTPLQKAQVVELVKKYRNAVTLAIGDGANDVSMIKSAHIGVGISGQEGLQAVLASDYSFAQFRYLQRLLLVHGRWSYFRMCKFLCYFFYKNFAFTLVHFWFGFFCGFSAQTVYDQWFITLFNIVYTSLPVLAMGIFDQDVSDQNSVDCPQLYKPGQLNLLFNKRKFFICVMHGIYTSLVLFFIPYGAFYNVAGEDGQHIADYQSFAVTMATSLVIVVSVQIALDTSYWTFINHVFIWGSIAIYFSILFTMHSNGIFGIFPNQFPFVGNARHSLTQKCIWLVILLTTVASVMPVVAFRFLKVDLYPTLSDQIRRWQKAQKKARPPSSRRPRTRRSSSRRSGYAFAHQEGYGELITSGKNMRAKNPPPTSGLEKTHYNSTSWIENLCKKTTDTVSSFSQDKTVKL

SEQ ID NO: 754 - protein, 45 aa, Homo sapiens
INSCNIKGLKCFYIVFGCLLLVPISDKLYGLLHLIPFIWRVLLPC

SEQ ID NO: 755 - protein, 137 aa, Homo sapiens
MKLLVILLFSGLITGFRSDSSSSLPPKLLLVSFDGFRADYLKNYEFPHLQNFIKEGVLVEHVKNVFITKTFPNHYSIVTGLYEESHGIVANSMYDAVTKKHFSDSNDKDPFWWNEAVPIWVTNQLQETDQVAAAMWA

SEQ ID NO: 756 - protein, 6 aa, Homo sapiens
KMMMIL

SEQ ID NO: 757 - protein, 101 aa, Homo sapiens
  SITE (97): Xaa equals any of the naturally occurring L-amino acids
SFSFKVVDVFEVSKIVAEYFILGPCNGVSFNDCIIVIGGYEFQKSILGIQLMSGFYIGWNRKVCPVSILTLSTRHLPICLSLRSQNINSNCKLSKNXKSIC

SEQ ID NO: 758 - protein, 12 aa, Homo sapiens
LLTILLWSALSY

SEQ ID NO: 759 - protein, 453 aa, Homo sapiens
MKLLVILLFSGLITGFRSDSSSSLPPKLLLVSFDGFRADYLKNYEFPHLQNFIKEGVLVEHVKNVFITKTFPNHYSIVTGLYEESHGIVANSMYDAVTKKHFSDSNDKDPFWWNEAVPIWVTNQLQENRSSAAAMWPGTDVPIHDTISSYFMNYNSSVSFEERLNNITMWLNNSNPPVTFATLYWEEPDASGHKYGPEDKENMSRVLKKIDDLIGDLVQRLKMLGLWENLNVIITSDHGMTQCSQDRLINLDSCIDHSYYTLIDLSPVAAILPKINRTEVYNKLKNCSPHMNVYLKEDIPNRFYYQHNDRIQPIILVADEGWTIVLNESSQKLGDHGYDNSLPSMHPFLAAHGPAFHKGYKHSTINIVDIYPMMCHILGLKPHPNNGTFGHTKCLLVDQWCINLPEAIAIVIGSLLVLTMLTCLIIIMQNRLSVPRPFSRLQLQEDDDDPLIG

SEQ ID NO: 760 - protein, 11 aa, Homo sapiens
WHILQMKGLTW

SEQ ID NO: 761 - protein, 31 aa, Homo sapiens
FAIFIYFSVSYIADGNEFEVPRAEDPCLLCF

SEQ ID NO: 762 - protein, 245 aa, Homo sapiens
  SITE (110): Xaa equals any of the naturally occurring L-amino acids
MRIFAVFIFMTYWHLLNAFTVTVPKDLYVVEYGSNMTIECKFPVEKQLDLAALIVYWEMEDKNIIQFVHGEEDLKVQHSSYRQRARLLKDQLSLGNAALQITDVKLQDAXVYRCMISYGGADYKRITVKVNAPYNKINQRILVVDPVTSEHELTCQAEGYPKAEVIWTSSDHQVLSGKTTTTNSKREEKLFNVTSTLRINTTTNEIFYCTFRRLDPEENHTAELVIPGNILNVSIKICLTLSPST

SEQ ID NO: 763 - protein, 290 aa, Homo sapiens
MRIFAVFIFMTYWHLLNAFTVTVPKDLYVVEYGSNMTIECKFPVEKQLDLAALIVYWEMEDKNIIQFVHGEEDLKVQHSSYRQRARLLKDQLSLGNAALQITDVKLQDAGVYRCMISYGGADYKRITVKVNAPYNKINQRILVVDPVTSEHELTCQAEGYPKAEVIWTSSDHQVLSGKTTTTNSKREEKLFNVTSTLRINTTTNEIFYCTFRRLDPEENHTAELVIPELPLAHPPNERTHLVILGAILLCLGVALTFIFRLRKGRMMDVKKCGIQDTNSKKQSDTHLEET

SEQ ID NO: 764 - protein, 91 aa, Homo sapiens
  SITE (40): Xaa equals any of the naturally occurring L-amino acids
SVSKKKKKKKVFCILYKLVVVGSRGLSTDDLMRSVSRFAXSQTFVLLNSSSFFSFLETESSSVTRLECSGTIKAYCSLYLPGSRNPPTLAS

SEQ ID NO: 765 - protein, 53 aa, Homo sapiens
MVYCVVSPRRATLFCVLLLGTRCEIISVRSSFGEYDKINSILKGLLKIPFNEF

SEQ ID NO: 766 - protein, 95 aa, Homo sapiens
PPRTRLFLVILFCCFRRNDTSFCFFEEKVFHVTVARTNTKRSRLQMLQACAVVCVCVCVCVCVCTYIYGKHIYCCAARGKPAKKCVCLYEMFEKR

SEQ ID NO: 767 - protein, 53 aa, Homo sapiens; identical to SEQ ID NO: 765

SEQ ID NO: 768 - protein, 41 aa, Homo sapiens
MPSGCRCLHLVCLLCILGAPGQPVRADDCSPTVTWPTAAVN

SEQ ID NO: 769 - protein, 20 aa, Homo sapiens
PGLCSQLHVPLLGGLCGCPL

SEQ ID NO: 770 - protein, 383 aa, Homo sapiens
MPSGCRCLHLVCLLCILGAPGQPVRADDCSSHCDLAHGCCAPDGSCRCDPGWEGLHCERCVRMPGCQHGTCHQPWQCICHSGWAGKFCDKDEHICTTQSPCQNGGQCMYDGGGEYHCVCLPGFHGRDCERKAGPCEQAGSPCRNGGQCQDDQGFALNFTCRCLVGFVGARCEVNVDDCLMRPCANGATCLDGINRFSCLCPEGFAGRFCTINLDDCASRPCQRGARCRDRVHDFDCLCPSGYGGKTCELVLPVPDPPTTVDTPLGPTSAVVVPATGPAPHSAGAGLLRISVKEVVRRQEAGLGEPSLVALVVFGALTAALVLATVLLTLRAWRRGVCPPGPCCYPAPHYAPACQDQECQVSMLPAGLPLPRDLPPEPGKTTAL

SEQ ID NO: 771 - protein, 10 aa, Homo sapiens
PQTAGPQKCA

SEQ ID NO: 772 - protein, 10 aa, Homo sapiens
PFPAGPHSWI

SEQ ID NO: 773 - protein, 35 aa, Homo sapiens
MGRGPWDAGPSRRLLPLLLLLGLARGAAERRAPTV

SEQ ID NO: 774 - protein, 747 aa, Homo sapiens
MGRGPWDAGPSRRLLPLLLLLGLARGAAGAPGPDGLDVCATCHEHATCQQREGKKICICNYGFVGNGRTQCVDKNECQFGATLVCGNHTSCHNTPGGFYCICLEGYRATNNNKTFIPNDGTFCTDIDECEVSGLCRHGGRCVNTHGSFECYCMDGYLPRNGPEPFHPTTDATSCTEIDCGTPPEVPDGYIIGNYTSSLGSQVRYACREGFFSVPEDTVSSCTGLGTWESPKLHCQEINCGNPPEMRHAILVGNHSSRLGGVARYVCQEGFESPGGKITSVCTEKGTWRESTLTCTEILTKINDVSLFNDTCVRWQINSRRINPKISYVISIKGQRLDPMESVREETVNLTTDSRTPEVCLALYPGTNYTVNISTAPPRRSMPAVIGFQTAEVDLLEDDGSFNISIFNETCLKLNRRSRKVGSEHMYQFTVLGQRWYLANFSHATSFNFTTREQVPVVCLDLYPTTDYTVNVTLLRSPKRHSVQITIATPPAVKQTISNISGFNETCLRWRSIKTADMEEMYLFHIWGQRWYQKEFAQEMTFNISSSSRDPEVCLDLRPGTNYNVSLRALSSELPVVISLTTQITEPPLPEVEFFTVHRGPLPRLRLRKAKEKNGPISSYQVLVLPLALQSTFSCDSEGASSFFSNASDADGYVAAELLAKDVPDDAMEIPIGDRLYYGEYYNAPLKRGSDYCIILRITSEWNKVRRHSCAVWAQVKDSSLMLLQMAGVGLGSLAVVIILTFLSFSAV

SEQ ID NO: 775 - protein, 45 aa, Homo sapiens
TWWPPCPPAPMGQVGSCFAGLCGQHTRGLHGWPQPSPAAPQMRSC

SEQ ID NO: 776 - protein, 17 aa, Homo sapiens
GWCSRRDSCWPSPPTMP

SEQ ID NO: 777 - protein, 120 aa, Homo sapiens
  SITE (103): Xaa equals any of the naturally occurring L-amino acids
MGTVSSRRSWWPLPLLLLLLLLLGPAGARAQEDEDGDYEELVLALRSEEDGLAEAPEHGTTATFHRCAKDPWRLPGTYVVVLKEETHLSQSERTARRLQAQAXRRGYLPRSCMSSMAFFL

SEQ ID NO: 778 - protein, 269 aa, Homo sapiens
  SITE (236): Xaa equals any of the naturally occurring L-amino acids
  SITE (257): Xaa equals any of the naturally occurring L-amino acids
MGTVSSRRSWWPLPLLLLLLLLLGPAGARAQEDEDGDYEELVLALRSEEDGLAEAPEHGTTATFHRCAKDPWRLPGTYVVVLKEETHLSQSERTARRLQAQAARRGYLTKILHVFHGLLPGFLVKMSGDLLELALKLPHVDYIEEDSSVFAQSIPWNLERITPPRYRADEYQPPDGGSLVEVYLLDTSIQSDHREIEGRVMVTDFENVPEEDGTRFHRQASKCDSHGPTWQGWSAXGMPAWPRVPACAACACFPKKXPLLGGPPQKKGG

SEQ ID NO: 779 - protein, 107 aa, Homo sapiens
  SITE (92): Xaa equals any of the naturally occurring L-amino acids
MVRYTYSMLSVIGISYAVLTWLSQTLWMPIYPLCVLAEAFAIYQSLPYFESFGTYSTKLPFDLSIYFPYVLKIYLMMLFIGMYFTYSHLYSXRRDILGIFPIKKKKM

SEQ ID NO: 780 - protein, 37 aa, Homo sapiens
MVRYTYSMLSVIGISYAVLTWAQSNTMDANLSFVCSC

SEQ ID NO: 781 - protein, 107 aa, Homo sapiens
MVRYTYSMLSVIGISYAVLTWLSQTLWMPIYPLCVLAEAFAIYQSLPYFESFGTYSTKLPFDLSIYFPYVLKIYLMMLFIGMYFTYSHLYSERRDILGIFPIKKKKM

SEQ ID NO: 782 - protein, 53 aa, Homo sapiens
  SITE (40): Xaa equals any of the naturally occurring L-amino acids
SNPSHILMISILLSHASRGAGADPKRSCCPQRVGSRGRAXVRLTRLCSQPSPH

SEQ ID NO: 783 - protein, 33 aa, Homo sapiens
HHVAQALPPAGAPRGRPHQPHPAPVGQGSPERG

SEQ ID NO: 784 - protein, 74 aa, Homo sapiens
MGFHHVSQAALVLLLLLLLLLLFDTESRSSLATERDSISKKKNKKTKKKNRKETKNVVLILINSNSFMWLAAAL

SEQ ID NO: 785 - protein, 74 aa, Homo sapiens; identical to SEQ ID NO: 784

SEQ ID NO: 786 - protein, 178 aa, Homo sapiens
  SITE (157): Xaa equals any of the naturally occurring L-amino acids
  SITE (170): Xaa equals any of the naturally occurring L-amino acids
  SITE (171): Xaa equals any of the naturally occurring L-amino acids
  SITE (177): Xaa equals any of the naturally occurring L-amino acids
MAAPRGRAAPWTTALLLLLASQVLSPGSCADEEEVPEEWVLLHVVQGQIGAGNYSYLRLNHEGKIVLRMRSLKGDADLYVSASSLHPSFDDYELQSATCGPDAVSIPAHFRRPVGIGVYGHPSHLESEFEMKVYYDGTVEQHPFGEAAYPADGQMPXRSTLVPRKTPRKXXNLFSGXY

SEQ ID NO: 787 - protein, 191 aa, Homo sapiens
MAAPRGRAAPWTTALLLLLASQVLSPGSCADEEEVPEEWVLLHVVQGQIGAGNYSYLRLNHEGKIVLRMRSLKGDADLYVSASSLHPSFDDYELQSATCGPDAVSIPAHFRRPVGIGVYGHPSHLESEFEMKVYYDGTVEQHPFGEAAYPADGADAGQKHAGAPEDASQEEESVLWTILISILKLELEILF

SEQ ID NO: 788 - protein, 8 aa, Homo sapiens
TAIFFLLV

SEQ ID NO: 789 - protein, 56 aa, Homo sapiens
  SITE (9): Xaa equals any of the naturally occurring L-amino acids
  SITE (24): Xaa equals any of the naturally occurring L-amino acids
  SITE (30): Xaa equals any of the naturally occurring L-amino acids
MRFWFLVFXFFFFPEAHVYPTSWXVSEQGXATISVTPGILNWIFVEEENNTVLDFP

SEQ ID NO: 790 - protein, 279 aa, Homo sapiens
EERWKSPEVRWAPGVAMEESGYESVLCVKPDVHVYRIPPRATNRGYRAAEWQLDQPSWSGRLRITAKGQMAYIKLEDRTSGELFAQAPVDQFPGTAVESVTDSSRYFVIRIEDGNGRRAFIGIGFGDRGDAFDFNVALQDHFKWVKQQCEFAKQAQNPDQGPKLDLGFKEGQTIKLNIANMKKKEGAAGNPRVRPASTGGLSLLPPPPGGKTSTLIPPPGEQLAVGGSLVQPAVAPSSGGAPVPWPQPNPATADIWGDFTKSTGSTSSQTQPGTGWVQF

SEQ ID NO: 791 - protein, 106 aa, Homo sapiens
RSRSKPRCNCEIVTIFFARFKIGPGRHRKRKIPKLCSSGSTIGRVYSLPGLLRRGSCLFGYITPDWFVLKINVIMLVSYLMVSLEHSPLILFERVGGRDCEGREKC

SEQ ID NO: 792 - protein, 56 aa, Homo sapiens [sequence omitted]

SEQ ID NO: 793 - protein, 41 aa, Homo sapiens
MTFSPLMCYCCCWVGWAFCLFVWWQSVVVGSGRAYIGFSSY

SEQ ID NO: 794 - protein, 41 aa, Homo sapiens; identical to SEQ ID NO: 793

SEQ ID NO: 795 - protein, 41 aa, Homo sapiens; identical to SEQ ID NO: 793

SEQ ID NO: 796 - protein, 43 aa, Homo sapiens
FLRFDGIIMEALYKLNEIGKGELTLSIMHSGLKIRFQNEMSDL

SEQ ID NO: 797 - protein, 12 aa, Homo sapiens
IGVNYLLLFFIF

SEQ ID NO: 798 - protein, 19 aa, Homo sapiens
KLGFSTILLLSIFIMSEAN

SEQ ID NO: 799 - protein, 19 aa, Homo sapiens
KLGFSTILLLSIFIMSEAN

SEQ ID NO: 800 - protein, 23 aa, Homo sapiens
LCVCTGCPGGGPQIPFRWQTERG

SEQ ID NO: 801 - protein, 29 aa, Homo sapiens
VCVCVCLIARVYFCIYVCVWLHGCASVCL

SEQ ID NO: 802 - protein, 6 aa, Homo sapiens
VLPSAS

SEQ ID NO: 803 - protein, 35 aa, Homo sapiens
  SITE (10): Xaa equals any of the naturally occurring L-amino acids
  SITE (27): Xaa equals any of the naturally occurring L-amino acids
MRASGVYVSXCSFVFMCVCVCMLNSRXTFDYGVCG

SEQ ID NO: 804 - protein, 56 aa, Homo sapiens
MRASGVYVSECSFVFMCVCVCMSDCTGVLLYLCVCVVARVCLCVSLTLAGCVCKSV

SEQ ID NO: 805 - protein, 60 aa, Homo sapiens
MIRIQFLHLFLWVGFIFRQPPSSYPQDGRDSPWSFPCRDRSPGNNTSIPSHETVLNFILT

SEQ ID NO: 806 - protein, 60 aa, Homo sapiens; identical to SEQ ID NO: 805

SEQ ID NO: 807 - protein, 444 aa, Homo sapiens
  SITE (92): Xaa equals any of the naturally occurring L-amino acids
  SITE (95): Xaa equals any of the naturally occurring L-amino acids
  SITE (97): Xaa equals any of the naturally occurring L-amino acids
  SITE (98): Xaa equals any of the naturally occurring L-amino acids
  SITE (101): Xaa equals any of the naturally occurring L-amino acids
MLQRIGLIFLHNIVVVSNCFYFQAFLDEFTNWSRINPNKARIPMAGDTQGVVGTVSKPCFTAYEMKIGAITFQVATGDIATEQVDVIVNSTXRTXNXXSGXSRAILEGAGQAVESECAVLAAQPHRDFIITPGGCLKCKIIIHVPGGKDVRKTVTSVLEECEQRKYTSVSLPAIGTGNAGKNPITVADNIIDAIVDFSSQHSTPSLKTVKVVIFQPELLNIFYDSMKKRDLSASLNFQSTFSMTTCNLPEHWTDMNHQLFCMVQLEPGQSEYNTIKDKFTRTCSSYAIEKIERIQNAFLWQSYQVKKRQMDIKNDHKNNERLLFHGTDADSVPYVNQHGFNRSCAGKNAVSYGKGTYFAVDASYSAKDTYSKPDSNGRKHMYVVRVLTGVFTKGRAGLVTPPPKNPHNPTDLFDSVTNNTRSPKLFVVFFDNQAYPEYLITFTA

SEQ ID NO: 808 - protein, 505 aa, Homo sapiens
  SITE (358): Xaa equals any of the naturally occurring L-amino acids
  SITE (494): Xaa equals any of the naturally occurring L-amino acids
  SITE (504): Xaa equals any of the naturally occurring L-amino acids
  SITE (505): Xaa equals any of the naturally occurring L-amino acids
MFRTAVMMAASLALTGAVVAHAYYLKHQFYPTVVYLTKSSPSMAVLYIQAFVLVFLLGKVMGKVFFGQLRAAEMEHLLERSWYAVTETCLAFTVFRDDFSPRFVALFTLLLFLKCFHWLAEDRVDFMERSPNISWLFHCRIVSLMFLLGILDFLFVSHAYHSILTRGASVQLVFGFEYAILMTMVLTIFIKYVLHSVDLQSENPWDNKAVYMLYTELFTGFIKVLLYMAFMTIMIKVHTFPLFAIRPMYLAMRQFKKAVTDAIMSRRAIRNMNTLYPDATPEELQAMDNVCIICREEMVTGAKRLPCNHIFHTSCLRSWFQRQQTCPTCRMDVLRASLPAQSPPPPEPADQGPPPAPXPPPLLPQPPNFPQGLLPPFPPGMFPLWPPMGPFPPVPPPPSSGEAVAPPSTSAAALSRPSGAATTTAAGTSATAASATASGPGSGSAPEAGPAPGFPFPPPWMGMPLPPPFAFPPMPVPPAGFAGLTPEEYELWRXMSGRTGGPVXX

SEQ ID NO: 809 - protein, 191 aa, Homo sapiens
  SITE (18): Xaa equals any of the naturally occurring L-amino acids
  SITE (21): Xaa equals any of the naturally occurring L-amino acids
MFRTAVMMAASIWPRLWXCPXGWPCPWFPLPSSLDGYAPASTLCLPPNACAPCGFAGLTPEELRALEGHERQHLEARLQSLRNIHTLLDAAMLQINQYLTVLASLGPPRPATSVNSTEETATTVVAAASSTSIPSSEATTPTPGASPPAPEMERPPAPESVGTEEMPEDGEPDAAELRRRRLQKLESPVAH

SEQ ID NO: 810 - protein, 617 aa, Homo sapiens
MFRTAVMMAASLALTGAVVAHAYYLKHQFYPTVVYLTKSSPSMAVLYIQAFVLVFLLGKVMGKVFFGQLRAAEMEHLLERSWYAVTETCLAFTVFRDDFSPRFVALFTLLLFLKCFHWLAEDRVDFMERSPNISWLFHCRIVSLMFLLGILDFLFVSHAYHSILTRGASVQLVFGFEYAILMTMVLTIFIKYVLHSVDLQSENPWDNKAVYMLYTELFTGFIKVLLYMAFMTIMIKVHTFPLFAIRPMYLAMRQFKKAVTDAIMSRRAIRNMNTLYPDATPEELQAMDNVCIICREEMVTGAKRLPCNHIFHTSCLRSWFQRQQTCPTCRMDVLRASLPAQSPPPPEPADQGPPPAPHPPPLLPQPPNFPQGLLPPFPPGMFPLWPPMGPFPPVPPPPSSGEAVAPPSTSAAALSRPSGAATTTAAGTSATAASATASGPGSGSAPEAGPAPGFPFPPPWMGMPLPPPFAFPPMPVPPAGFAGLTPEELRALEGHERQHLEARLQSLRNIHTLLDAAMLQINQYLTVLASLGPPRPATSVNSTEETATTVVAAASSTSIPSSEATTPTPGASPPAPEMERPPAPESVGTEEMPEDGEPDAAELRRRRLQKLESPVAH

SEQ ID NO: 811 - protein, 20 aa, Homo sapiens
MNVRLVLNPFPLYSVYVIPN

SEQ ID NO: 812 - protein, 11 aa, Homo sapiens
LEILVVKKLLA

SEQ ID NO: 813 - protein, 20 aa, Homo sapiens
MNVRLVLNPFPLYSVYVIPN

SEQ ID NO: 814 - protein, 62 aa, Homo sapiens
MLCPALGPFLLFLLSSTLMASFMGDTPCHPGELSAFGVAPSRVFTSSFLFTVFTPSYPSLPG

SEQ ID NO: 815 - protein, 62 aa, Homo sapiens; identical to SEQ ID NO: 814

SEQ ID NO: 816 - protein, 51 aa, Homo sapiens
QASWVWWLTTVIPALWEARAGGSLEPRSSRLAWATQKVFISKKKKKKKRAA

SEQ ID NO: 817 - protein, 19 aa, Homo sapiens [sequence omitted]

SEQ ID NO: 818 - protein, 4 aa, Homo sapiens
FLSS

SEQ ID NO: 819 - protein, 53 aa, Homo sapiens
MFISLFIFGLVRLWPCCVVIYFVYSICKHQCSQEAHSSIFNCKFVSQSQFSIM

SEQ ID NO: 820 - protein, 53 aa, Homo sapiens; identical to SEQ ID NO: 819

SEQ ID NO: 821 - protein, 283 aa, Homo sapiens
MIFLLLMLSLELQLHQIAALFTVTVPKELYIIEHGSNVTLECNFDTGSHVNLGAITASLQKVENDTSPHRERATLLEEQLPLGKASFHIPQVQVRDEGQYQCIIIYGVAWDYKYLTLKVKASYRKINTHILKVPETDEVELTCQATGYPLAEVSWPNVSVPANTSHSRTPEGLYQVTSVLRLKPPPGRNFSCVFWNTHVRELTLASIDLQSQMEPRTHPTWLLHIFIPSCIIAFIFIATVIALRKQLCQKLYSSKDTTKRPVTTTKREVNSAVNLNLWSWEPG

SEQ ID NO: 822 - protein, 93 aa, Homo sapiens
  SITE (89): Xaa equals any of the naturally occurring L-amino acids
  SITE (92): Xaa equals any of the naturally occurring L-amino acids
MIFLLLMLSLELQLHQIAALFTVTVPKELYIIEHGSNVTLECNFDTGSHVNLGAITASLQKVENDTSPHRERATLLEEQLPLGKASFPXLKXK

SEQ ID NO: 823 - protein, 23 aa, Homo sapiens
LFLLLEISTHLCFWKSLRKLEGK

SEQ ID NO: 824 - protein, 46 aa, Homo sapiens
MPWLKSLLHFSLFLVVFSTLAVKSLGVPVAAGSPFCIVDVLHFILL

SEQ ID NO: 825 - protein, 46 aa, Homo sapiens; identical to SEQ ID NO: 824

SEQ ID NO: 826 - protein, 67 aa, Homo sapiens [sequence omitted]

SEQ ID NO: 827 - protein, 83 aa, Homo sapiens
GHVLAYSSWPSLAPGLSVQYFVSRVEVPNPGCTLEAPGKLSEFLRPEPHPKPISSESLGGTEPGFCQLKPAMVTSVSSYTENS

SEQ ID NO: 828 - protein, 67 aa, Homo sapiens [sequence omitted]

SEQ ID NO: 829 - protein, 83 aa, Homo sapiens; identical to SEQ ID NO: 827

SEQ ID NO: 830 - protein, 66 aa, Homo sapiens
  SITE (9): Xaa equals any of the naturally occurring L-amino acids
SWVDFDCVXEVSYLNSGSYSLVLHLEGLHPLELSGKLAIDFGKKREFCVDGVGGATLVICPGFQDF

SEQ ID NO: 831 - protein, 61 aa, Homo sapiens
  SITE (13): Xaa equals any of the naturally occurring L-amino acids
MWYVCACVCVCVXVCSYNRRTGKVRTQNNEDLLKCGGGVCVCVFIEQEDRKGNDHPWKMKG

SEQ ID NO: 832 - protein, 11 aa, Homo sapiens
VCCCLHLNAFV

SEQ ID NO: 833 - protein, 716 aa, Homo sapiens
MNNFRATILFWAAAAWAKSGKPSGEMDEVGVQKCKNALKLPVLEVLPGGGWDNLRNVDMGRVMELTYSNCRTTEDGQYIIPDEIFTIPQKQSNLEMNSEILESWANYQSSTSYSINTELSLFSKVNGKFSTEFQRMKTLQVKDQAITTRVQVRNLVYTVKINPTLELSSGFRKELLDISDRLENNQTRMATYLAELLVLNYGTHVTTSVDAGAALIQEDHLRASFLQDSQSSRSAVTASAGLAFQNTVNFKFEENYTSQNVLTKSYLSNRTNSRVQSIGGVPFYPGITLQAWQQGITNHLVAIDRSGLPLHFFINPNMLPDLPGPLVKKVSKTVETAVKRYYTFNTYPGCTDLNSPNFNFQANTDDGSCEGKMTNFSFGGVYQECTQLSGNRDVLLCQKLEQKNPLTGDFSCPSGYSPVHLLSQIHEEGYNHLECHRKCTLLVFCKTVCEDVFQVAKAEFRAFWCVASSQVPENSGLLFGGLFSSKSINPMTNAQSCPAGYFPLRLFENLKVCVSQDYELGSRFAVPFGGFFSCTVGNPLVDPAISRDLGAPSLKKCPGGFSQHPALISDGCQVSYCVKSGLFTGGSLPPARLPPFTRPPLMSQAATNTVIVTNSENARSWIKDSQTHQWRLGEPIELRRAMNVIHGDGGGLSGGAAAGVTVGVTTILAVVITLAIYGTRKFKKKAYQAIEERQSLVPGTAATGDTTYQEQGQSPA

SEQ ID NO: 834 - protein, 94 aa, Homo sapiens
LAVIMARPAAEPLCFLNPKLLALAVGVLELLGRGFLDSSPLLRPASDGERFTWEALGESLPFSDTFASSVFPVPGVFSAPAGAEAFVLGMVMPT

SEQ ID NO: 835 - protein, 39 aa, Homo sapiens
MHLLPWRAAAAPPLLIAVPPRPSRSPVQPPSLGAANPSA

SEQ ID NO: 836 - protein, 9 aa, Homo sapiens
PSAAASATP

SEQ ID NO: 837 - protein, 63 aa, Homo sapiens
  SITE (12): Xaa equals any of the naturally occurring L-amino acids
  SITE (16): Xaa equals any of the naturally occurring L-amino acids
  SITE (20): Xaa equals any of the naturally occurring L-amino acids
  SITE (23): Xaa equals any of the naturally occurring L-amino acids
  SITE (25): Xaa equals any of the naturally occurring L-amino acids
  SITE (35): Xaa equals any of the naturally occurring L-amino acids
  SITE (38): Xaa equals any of the naturally occurring L-amino acids
  SITE (48): Xaa equals any of the naturally occurring L-amino acids
  SITE (49): Xaa equals any of the naturally occurring L-amino acids
MHLLPWRAAAAXPLLXAVPXRAXRXPVQAPSLGAXNPXRGTQVATVSXXSGKLLGLKAPRPKP

SEQ ID NO: 838 - protein, 84 aa, Homo sapiens
TYSFCVCERAFVFGSVPRAEVEQGCTYHGKGGRKENWIACDLWWNLFLLPRPFRPCLISVGHFRLWQGRAGLQSEVPASSLEHN

SEQ ID NO: 839 - protein, 77 aa, Homo sapiens
  SITE (8): Xaa equals any of the naturally occurring L-amino acids
  SITE (9): Xaa equals any of the naturally occurring L-amino acids
  SITE (10): Xaa equals any of the naturally occurring L-amino acids
  SITE (16): Xaa equals any of the naturally occurring L-amino acids
LGGYALSXXXNRVTDXVMIYFFIIIVEYFYGKIFVVLIIPIKIMPNTKYEFYDVHFVLGIKRKKHTSWKSVSCFLLL

SEQ ID NO: 840 - protein, 184 aa, Homo sapiens
MSRTAYTVGALLLLLGTLLPAAEGKKKGSQGAIPPPDKAQHNDSEQTQSPQQPGSRNRGRGQGRGTAMPGEEVLESSQEALHVTERKYLKRDWCKTQPLKQTIHEEGCNSRTIINRFCYGQCNSFYIPRHIRKEEGSFQSCSFCKPKKFTTMMVTLNCPELQPPTKKKRVTRVKQCRCISIDLD

SEQ ID NO: 841 - protein, 87 aa, Homo sapiens
  SITE (1): Xaa equals any of the naturally occurring L-amino acids
  SITE (26): Xaa equals any of the naturally occurring L-amino acids
XHSHWEGLKLCCLNPVLGPARKRKRXLRNRGARGGCRCHSRAALHPHPHASCFTAHSVTELVALGTGGHPHTLMPTAEGRATHPSRD

SEQ ID NO: 842 - protein, 77 aa, Homo sapiens
FVLLHCLNSHLHLALQFPLNTLSSPLVCCQSAALPIKACINYICPMFTFIKHFPCTPVPTSQQTRERAVQLMSLPSF

SEQ ID NO: 843 - protein, 41 aa, Homo sapiens
MAFPRVGAFLFLASLSSLLHCRLLAEAVSGRSVSLAPSIIR

SEQ ID NO: 844 - protein, 164 aa, Homo sapiens
  SITE (3): Xaa equals any of the naturally occurring L-amino acids
  SITE (95): Xaa equals any of the naturally occurring L-amino acids
RMXCSQPPRCHFQSDFQKCAPCPRAQTHWLEPPGRVQTISSMRNAQKGFADSIRLWRLPASGVGWVVSPPIQTQEVAPEGMYLVGSSSGTLGGCXALTQYFSLSPLWGACVRARVLAYAFLCGHIRMPLGEHVHVSPPERACVCAPLRPRFGRLGFGVPVFCPP

SEQ ID NO: 845 - protein, 80 aa, Homo sapiens
  SITE (25): Xaa equals any of the naturally occurring L-amino acids
MGTSTAWRVPWRRWARVRCWWLWPXTGTAEPPGTAGWQGLAGGRCREAWGSLLMGMFGLCFLPVHSQSCLSSSSSPTPRP

SEQ ID NO: 846 - protein, 53 aa, Homo sapiens
  SITE (4): Xaa equals any of the naturally occurring L-amino acids
  SITE (10): Xaa equals any of the naturally occurring L-amino acids
  SITE (27): Xaa equals any of the naturally occurring L-amino acids
IGPXGPRNSXTGGAFLDFSAQAKKKKXQFLKIFFPGLCKSLIYGIFVMQRNTL

SEQ ID NO: 847 - protein, 50 aa, Homo sapiens [sequence omitted]

SEQ ID NO: 848 - protein, 86 aa, Homo sapiens
  SITE (3): Xaa equals any of the naturally occurring L-amino acids
  SITE (5): Xaa equals any of the naturally occurring L-amino acids
  SITE (6): Xaa equals any of the naturally occurring L-amino acids
KKXPXXLSGSKAIASKTKEIEQVYRQDCETFGMVVKMLIEKDPSLEKSIQFALRQNLHEIGERCVEELKHFIAEYDTSTQDFGEPF

SEQ ID NO: 849 - protein, 129 aa, Homo sapiens
RKVEGGASGLNGFPNHPSSLGPAWFPPLPLPSTLSRTGLMKALPKISPTPNFPLPPTFPTSSTTLFGATAGPEAQSAVSQAFVHLSPQSISVLGESHTETQEHPLPELREVLSLRGGLSAVCNNVVLFI

SEQ ID NO: 850 - protein, 48 aa, Homo sapiens
  SITE (45): Xaa equals any of the naturally occurring L-amino acids
  SITE (46): Xaa equals any of the naturally occurring L-amino acids
  SITE (48): Xaa equals any of the naturally occurring L-amino acids
MVQRLWVSRLLRHRKAQLLLVNLLTFGLEVCLAAGFTYVPLCCGXXVX

SEQ ID NO: 851 - protein, 12 aa, Homo sapiens
ILQRRKQRLLRG

SEQ ID NO: 852 - protein, 371 aa, Homo sapiens
  SITE (20): Xaa equals any of the naturally occurring L-amino acids
MLFPSFSRSLVPLPHALYLXQPLTHTTSLLAGIGPVLGLVCVPLLGSASDHWRGRYGRRRPFIWALSLGILLSLFLIPRAGWLAGLLCPDPRPLELALLILGVGLLDFCGQVCFTPLEALLSDLFRDPDHCRQAYSVYAFMISLGGCLGYLLPAIDWDTSALAPYLGTQEECLFGLLTLIFLTCVAATLLVAEEAALGPTEPAEGLSAPSLSPHCCPCRARLAFRNLGALLPRLHQLCCRMPRTLRRLFVAELCSWMALMTFTLFYTDFVGEGLYQGVPRAEPGTEARRHYDEGKALAASRGWCGSRPPETTLGAVSGLVPLHPGPDFSVRKVGMDPICIHGFSWVWNISACGFRKASGCSRSLIRVVAPV

SEQ ID NO: 853 - protein, 75 aa, Homo sapiens
MGPLWGAPLRAWAAGSVGCPCCLSCASPSSISSAGDPLASCSTCGSTWEIPLTWMTMDHLLVRYYLSQARWCTTG

SEQ ID NO: 854 - protein, 57 aa, Homo sapiens
ISYHHVKASHLKIKIQISLKPEVLVPLHCLPLSPTPREESGGFLFSIAIAAVGFLVQ

SEQ ID NO: 855 - protein, 10 aa, Homo sapiens
WASMSSVFGL

SEQ ID NO: 856 - protein, 5 aa, Homo sapiens
SFATC

SEQ ID NO: 857 - protein, 73 aa, Homo sapiens
MWLPAWAAIETFSTCSSLSLSFQPRWALASEGCAGSYVTTHRALGAHLWPLWSDQFLGKGLGLRIPFITHAHQ

SEQ ID NO: 858 - protein, 36 aa, Homo sapiens
  SITE (17): Xaa equals any of the naturally occurring L-amino acids
MAGEEMAWGARLWIMCXLLFLAASEGIMPRLRASAW

SEQ ID NO: 859 - protein, 352 aa, Homo sapiens
VSLLLWGISIRGADACADAHLFCKECLIRYAQEAVFGSGKLELSCMEGSCTCSFPTSELEKVLPQTILYKYYERKAEEEVAAAYADELVRCPSCSFPALLDSDVKRFSCPNPHCRKETCRKCQGLWKEHNGLTCEELAEKDDIKYRTSIEEKMTAARIRKCHKCGTGLIKSEGCNRMSCRCGAQMCYLCRVSINGYDHFCQHPRSPGAPCQECSRCSLWTDPTEDDEKLIEEIQKEAEEEQKRKNGENTFKRIGPPLEKPVEKVQRVEALPRPVPQNLPQPQMPPYAFAHPPFPLPPVRPVFNNFPLNMGPIPAPYVPPLPNVRVNYDFGPIHMPLEHNLPMHFGPQPRHRF

SEQ ID NO: 860 - protein, 63 aa, Homo sapiens
MITFLPIIFSILVVVTFVIGNFANGFIALVNSTEWVKRQKISFADQIVTALAVSRVGLLWVLL

SEQ ID NO: 861 - protein, 8 aa, Homo sapiens
LTMLFNVI

SEQ ID NO: 862 - protein, 7 aa, Homo sapiens
TYIHFLD

SEQ ID NO: 863 - protein, 53 aa, Homo sapiens
  SITE (35): Xaa equals any of the naturally occurring L-amino acids
TEEFKYAVSCNCGTAAWVRVRERERKREKKKKKRXAALEDPSRGPSLRVHATS

SEQ ID NO: 864 - protein, 22 aa, Homo sapiens
LVLFITLLPGKLAHSWHTVNVQ

SEQ ID NO: 865 - protein, 2 aa, Homo sapiens
GC

SEQ ID NO: 866 - protein, 40 aa, Homo sapiens
MILYICLLLKIWGCSLPCNFSFPLDLRKVMDFQFVQHFFL

SEQ ID NO: 867 - protein, 7 aa, Homo sapiens
SFCMGTM

SEQ ID NO: 868 - protein, 86 aa, Homo sapiens
  SITE (2): Xaa equals any of the naturally occurring L-amino acids
  SITE (25): Xaa equals any of the naturally occurring L-amino acids
SXIVGLAIWRGGLCQELPLERFLLXTVFGSDLSLLSGGDLCLELLGGLCLEVCLRGDICLGPLRVSVSELSLLCLSVQGQQKVCPF

SEQ ID NO: 869 - protein, 33 aa, Homo sapiens
KILVSYLMPGMMRIENFSIFMCLTGCLGINFAF

SEQ ID NO: 870 - protein, 288 aa, Homo sapiens
  SITE (87): Xaa equals any of the naturally occurring L-amino acids
  SITE (99): Xaa equals any of the naturally occurring L-amino acids
  SITE (230): Xaa equals any of the naturally occurring L-amino acids
  SITE (263): Xaa equals any of the naturally occurring L-amino acids
  SITE (264): Xaa equals any of the naturally occurring L-amino acids
  SITE (270): Xaa equals any of the naturally occurring L-amino acids
  SITE (275): Xaa equals any of the naturally occurring L-amino acids
MARISFSYLCPASWYFTVPTVSPFLRQRVAFLGLFFISCLLLLMLIIDFRHWSASLPRDRQYERYLARVGELEATDTEDPNLNYGLXVDCGSSGSRIFXYFWPRHNGNPHDLLDIKQMRDRNSQPVVKKIKPGISAMADTPEHASDYLRPLLSFAAAHVPVKKHKETPLYILCTAGMRLLPERKQLAILADLVKDLPLEFDFLFSQSQAEVISGKQEGVYAWIGINFVLXRFDHEDESDAEATQELAAGRRRTVGILDMGGAXXQIAYEXPTFPXKKTPPLFPLLGGI

SEQ ID NO: 871 - protein, 107 aa, Homo sapiens
  SITE (66): Xaa equals any of the naturally occurring L-amino acids
PLGREPLAGFLSFLSFSLLWCLEAFPRLQFLTTLTDFAIVLSPPLSFPKLTLWRLIKRKNHRPGAXLTPRRRANHLRCGVRDQPDQNRETPSLLNNTKLAGRGGARL

SEQ ID NO: 872 - protein, 64 aa, Homo sapiens
  SITE (7): Xaa equals any of the naturally occurring L-amino acids
  SITE (27): Xaa equals any of the naturally occurring L-amino acids
SWVIVVXIWGYLLEGHGVPFCKSYGPXPWKLHTHHAAYNSGSSQVYRILGNSPCPVLIHCSFSG

SEQ ID NO: 873 - protein, 14 aa, Homo sapiens
  SITE (9): Xaa equals any of the naturally occurring L-amino acids
  SITE (14): Xaa equals any of the naturally occurring L-amino acids
WKGLLEGSXEATMX

SEQ ID NO: 874 - protein, 66 aa, Homo sapiens
MSWVIVVIIWGYLLEGHGVPFCKSYGPSPWKLHTHHAAYNSGSSQVYRILETLMSGSTHCSFSGTF

SEQ ID NO: 875 - protein, 90 aa, Homo sapiens
  SITE (31): Xaa equals any of the naturally occurring L-amino acids
  SITE (57): Xaa equals any of the naturally occurring L-amino acids
MPRAPWRIPLCALPTLCLGSPLPSQPTHPIXYDHRAPTWKMAHPGGPRSSHSPRTWXTPSSQTKAALPAGGARNSPLQLCTRSRFCGTPM

SEQ ID NO: 876 - protein, 127 aa, Homo sapiens
MPRAPWRIPLCALPTLCLGSPLPSQPTHPIFYDHRAPTWKMAHPGGPRSSHSPRGPGGHPALRQRLPCRRGEPETALCSSAPGAGFAEPPCKASPGWGPPSRGPQGDRSQGEWLPALGTPCGGPDDS

SEQ ID NO: 877 - protein, 66 aa, Homo sapiens
  SITE (43): Xaa equals any of the naturally occurring L-amino acids
MAGQFRSYVWDPLLILSQIVLMQTVYYGSLGLWLALVDGLVRXAPRWTRCSTPRSWAFPPLQAGSP

SEQ ID NO: 878 - protein, 124 aa, Homo sapiens
  SITE (28): Xaa equals any of the naturally occurring L-amino acids
TQIPTHISRYTPLHSSLGNRARLRLKKXKIKYAYLCPPSLKQLLNYAVINGLSSANYFCLYTKVPQAMLLLASGLSSAFPYDSLGFTLSMLLFFERNKSRVEVLAKEPSAPSSYWDSENRGCQL

SEQ ID NO: 879 - protein, 39 aa, Homo sapiens
MAGQFRSYVWDPLLILSQSSSCRPCITARWACGWRWWTG

SEQ ID NO: 880 - protein, 67 aa, Homo sapiens
MSLCRILGYSFSSRLSSLILPLAVFHYCLSCPLHFKLSFKYLPFPSFPFSSLPCPALPCPALPSPPL

SEQ ID NO: 881 - protein, 86 aa, Homo sapiens
MSLCRILGYSFSSRLSSLILPLAVFHYCLSCPLHFKLSFKYLPFPSFPFSSLPCPALPCPALPSPPLPCPPLPSPPLPLPSLSFFR

SEQ ID NO: 882 - protein, 55 aa, Homo sapiens
MCVGLFLSSVFFHICVHPFANATLSCLLEIGKLCESFNFVLFQIVLAILVPLTFI

SEQ ID NO: 883 - protein, 73 aa, Homo sapiens
TLFVSYQLSNPQYSSFISQNRKLKQREEKLHERFYTAVRSLNWILNLAFWLESPSFYQLCIAVRVDSPWKGKS

SEQ ID NO: 884 - protein, 48 aa, Homo sapiens
  SITE (15): Xaa equals any of the naturally occurring L-amino acids
  SITE (29): Xaa equals any of the naturally occurring L-amino acids
MKPPPLFFFLKIVLXIWGPLWFHMNFRFXFSISMKNAIGILIGIALNL

SEQ ID NO: 885 - protein, 48 aa, Homo sapiens
MKPPPLFFFLKIVLAIWGPLWFHMNFRFVFSISMKNAIGILIGIALNL

SEQ ID NO: 886 - protein, 214 aa, Homo sapiens
  SITE (199): Xaa equals any of the naturally occurring L-amino acids
  SITE (206): Xaa equals any of the naturally occurring L-amino acids
  SITE (214): Xaa equals any of the naturally occurring L-amino acids
MLGARAWLGRVLLLPRAGAGLAASRRCPGVWPRTWPHRSPSRGSSSRDKDRSATVSSSVPMPAGGKGSHPSSTPQRVPNRLIHEKSPYLLQHAYNPVDWYPWGQEAFDKARKENKPIFLSVGYSTCHWCHMMEEESFQNEEIGRLLSEDFVSVKVDREERPDVDKVYMTFVQATSSGGGWPMNVWLTPNLQPFVGGTIXLLKDGLXRVGSAQCX

SEQ ID NO: 887 - protein, 43 aa, Homo sapiens
MLGARAWLGRVLLLPRAGAGLAASRRSACSPTSRLNSLRSLIP

SEQ ID NO: 888 - protein, 802 aa, Homo sapiens [sequence omitted]

SEQ ID NO: 889 - protein, 98 aa, Homo sapiens
MHCCQLPWRCAQAPQEAFLLCLLFLILVLVLLGCSRGLPGHTPWRLHPAAAALLAPLLHDALGACGFQGPEYLLPCLLPLPKPGQLQGPWGPLWALLP

SEQ ID NO: 890 - protein, 25 aa, Homo sapiens
  SITE (9): Xaa equals any of the naturally occurring L-amino acids
CAVRFREQXAPERVFLPTRGRKSEP

SEQ ID NO: 891 - protein, 22 aa, Homo sapiens
LPRPCAPSPVWRQVGREEASLL

SEQ ID NO: 892 - protein, 98 aa, Homo sapiens; identical to SEQ ID NO: 889

SEQ ID NO: 893 - protein, 99 aa, Homo sapiens [sequence omitted]

SEQ ID NO: 894 - protein, 89 aa, Homo sapiens
MKPATASALLLLLLGLAWTQGSHGWGADASSLQKRAGRADQVSLCPQVTLQGPWSPLALLPGLGNLKFSFTPPFNGFLSRVQDGRRWQL

SEQ ID NO: 895 - protein, 73 aa, Homo sapiens
MAGNIQAVETGYVLICLIVPLLLCGLREGQEVPFDVNKAKYLPTFLKKKKKKKKKKKKKKKKKKKKKKKKKKI

SEQ ID NO: 896 - protein, 72 aa, Homo sapiens
MAGNIQAVETGYVLICLIVPLLLCGLREGQEVPFDVNKAKYLPTFLKKKKKKKKKKKKKKKKKKKKKKKKKK

SEQ ID NO: 897 - protein, 29 aa, Homo sapiens
  SITE (26): Xaa equals any of the naturally occurring L-amino acids
  SITE (29): Xaa equals any of the naturally occurring L-amino acids
MYVWVSGALVLVLSPHPASRTLCLMXQAX

SEQ ID NO: 898 - protein, 80 aa, Homo sapiens
PHCASRAVPYPPGPAAAAFPRQGLQLATTCGHSSDPACFGQCPCHLCANHPGYLWSYRVHLSPQPHLHPPQHLLPPHCTL

SEQ ID NO: 899 - protein, 29 aa, Homo sapiens
MYVWVSGALVLVLSPHPASRTLCLMAQAV

SEQ ID NO: 900 - protein, 53 aa, Homo sapiens [sequence omitted]

SEQ ID NO: 901 - protein, 46 aa, Homo sapiens
MRIPVFPKQLMFTGLVFLLLLSKDEGIHNRLSLENTNDGQLFGVIK

SEQ ID NO: 902 - protein, 19 aa, Homo sapiens
  SITE (7): Xaa equals any of the naturally occurring L-amino acids
  SITE (11): Xaa equals any of the naturally occurring L-amino acids
MPFTLGXTRRXRGLAKKPK

SEQ ID NO: 903 - protein, 531 aa, Homo sapiens
MLCALLLLPSLLGATRASPTSGPQECAKGSTVWCQDLQTAARCGAVGYCQGAVWNKPTAKSLPCDVCQDIAAAAGNGLNPDATESDILALVMKTCEWLPSQESSAGCKWMVDAHSSAILSMLRGAPDSAPAQVCTALSLCEPLQRHLATLRPLSKEDTFEAVAPFMANGPLTFHPRQAPEGALCQDCVRQVSRLQEAVRSNLTLADLNIQEQCESLGPGLAVLCKNYLFQFFVPADQALRLLPPQELCRKGGFCEELGAPARLTQVVAMDGVPSLELGLPRKQSEMQMKAGVTCEVCMNVVQKLDHWLMSNSSELMITHALERVCSVMPASITKECIILVDTYSPSLVQLVAKITPEKVCKFIRLCGNRRRARAVHDAYAIVPSPEWDAENQGSFCNGCKRLLTVSSHNLESKSTKRDILVAFKGGCSILPLPYMIQCKHFVTQYEPVLIESLKDMMDPVAVCKKVGACHGPRTPLLGTDQCALGPSFWCRSQEAASCATLCNTARSMYGKRCTSTLGNTRDRGCQRPRAC

SEQ ID NO: 904 - protein, 498 aa, Homo sapiens
  SITE (11): Xaa equals any of the naturally occurring L-amino acids
  SITE (20): Xaa equals any of the naturally occurring L-amino acids
  SITE (398): Xaa equals any of the naturally occurring L-amino acids
EALGGRCLWEXPVTFTVHFXDNSGDVFHAHSSVLNFATNRDDFVQIGKGPTNNTCVVRTVSVGLTLLRVWDAEHPGLSDFMPLPVLQAISPELSGAMVVGDVLCLATVLTSLEGLSGTWSSSANSILHIDPKTGVAVARAVGSVTVYYEVAGHLRTYKEVVVSVPQRIMARHLHPIQTSFQEATASKVIVAVGDRSSNLRGECTPTQREVIQALHPETLISCQSQFKPAVFDFPSQDVFTVEPQFDTALGQYFCSITMHRLTDKQRKHLSMKKTALVVSASLSSSHFSTEQVGAEVPFSPGLFADQAEILLSNHYTSSEIRVFGAPEVLENLEVKSGSPAVLAFAKEKSFGWPSFITYTVGVLDPAAGSQGPLSTTLTFSSPVTNQAIAIPVTVAFVXDRRGPGPYGASLFQHFLDSYQVMFFTLFALLAGTAVMIIAYHTVCTPRDLAVPAALTPRASPGHSPHYFAASSPTSPNALPPARKASPPSGLWSPAYASH

SEQ ID NO: 905 - protein, 886 aa, Homo sapiens
  SITE (26): Xaa equals any of the naturally occurring L-amino acids
  SITE (216): Xaa equals any of the naturally occurring L-amino acids
  SITE (234): Xaa equals any of the naturally occurring L-amino acids
  SITE (275): Xaa equals any of the naturally occurring L-amino acids
  SITE (871): Xaa equals any of the naturally occurring L-amino acids
MAARGRGLLLLTLSVLLAAGPSAAAXKLNIPKVLLPFTRATRVNFTLEASEGCYRWLSTRPEVASIEPLGLDEQQCSQKAVVQARLTQPARLTSIIFAEDITTGQVLRCDAIVDLIHDIQIVSTTRELYLEDSPLELKIQALDSEGNTFSTLAGLVFEWTIVKDSEADRFSDSHNALRILTFLESTYIPPSYISEMEKAAKQGDTILVSGMKTGSXKLKARIQEAVYKNVRPAXVRLLILENILLNPAYDVYLMVGTSIHYKVQKIRQGKITELXMPSDQYELQLQNSIPGPEGDPTRPVAVLAQDTSMVTALQLGQSSLVLGHRSIRMQGASRLPNSTIYVVEPGYLGFTVHPGDRWVLETGRLYEITIEVFDKFSNKVYVSDNIRIETVLPAEFFEVLSSSQNGSYHRIRALKRGQTAIDAALTSVVDQDGGVHILQVPVWNQQEVEIHIPITLYPSILTFPWQPKTGAYQYTIRAHGGSGNFSWSSSSHLVATVTVKGVMTTGSDIGFSVIQAHDVQNPLHFGEMKVYVIEPHSMEFAPCQVEARVGQALELPLRISGLMPGGASEVVTLSDCSHFDLAVEVENQGVFQPLPGRLPPGSEHCSGVRVKAEAQGSTTLLVSYRHGHVHLSAKITIAAYLPLKAVDPSSVALVTLGSSKEMLFEGGPRPWILEPSKFFQNVTAEDTDSIGLALFAPHSSRNYQQHWILVTCQALGEQVIALSVGNKPSLTNPFPAVEPAVVKFVCAPPSRLTLVPVYTSPQLDMSCPLLQQNKQVVPVSSHRNPLLDLAAYDQEGRRFDNFSSLSIQWESTRPVLASIEPELPMQLVSQDDESGQKKLHGLQAILVHEASGTTASLPLPLATRSPTSALXEQSSRMTLWCLCRPP

SEQ ID NO: 906 - protein, 1887 aa, Homo sapiens
MAARGRGLLLLTLSVLLAAGPSAAAAKLNIPKVLLPFTRATRVNFTLEASEGCYRWLSTRPEVASIEPLGLDEQQCSQKAVVQARLTQPARLTSIIFAEDITTGQVLRCDAIVDLIHDIQIVSTTRELYLEDSPLELKIQALDSEGNTFSTLAGLVFEWTIVKDSEADRFSDSHNALRILTFLESTYIPPSYISEMEKAAKQGDTILVSGMKTGSSKLKARIQEAVYKNVRPAEVRLLILENILLNPAYDVYLMVGTSIHYKVQKIRQGKITELSMPSDQYELQLQNSIPGPEGDPTRPVAVLAQDTSMVTALQLGQSSLVLGHRSIRMQGASRLPNSTIYVVEPGYLGFTVHPGDRWVLETGRLYEITIEVFDKFSNKVYVSDNIRIETVLPAEFFEVLSSSQNGSYHRIRALKRGQTAIDAALTSVVDQDGGVHILQVPVWNQQEVEIHIPITLYPSILTFPWQPKTGAYQYTIRAHGGSGNFSWSSSSHLVATVTVKGVMTTGSDIGFSVIQAHDVQNPLHFGEMKVYVIEPHSMEFAPCQVEARVGQALELPLRISGLMPGGASEVVTLSDCSHFDLAVEVENQGVFQPLPGRLPPGSEHCSGVRVKAEAQGSTTLLVSYRHGHVHLSAKITIAAYLPLKAVDPSSVALVTLGSSKEMLFEGGPRPWILEPSKFFQNVTAEDTDSIGLALFAPHSSRNYQQHWILVTCQALGEQVIALSVGNKPSLTNPFPAVEPAVVKFVCAPPSRLTLVPVYTSPQLDMSCPLLQQNKQVVPVSSHRNPLLDLAAYDQEGRRFDNFSSLSIQWESTRPVLASIEPELPMQLVSQDDESGQKKLHGLQAILVHEASGTTAITATATGYQESHLSSARTKQPHDPLVPLSASIELILVEDVRVSPEEVTIYNHPGIQAELRIREGSGYFFLNTSTADVVKVAYQEARGVAMVHPLLPGSSTIMIHDLCLVFPAPAKAVVYVSDIQELYIRVVDKVEIGKTVKAYVRVLDLHKKPFLAKYFPFMDLKLRAASPIITLVALDEALDNYTITFLIRGVAIGQTSLTASVTNKAGQRINSAPQQIEVFPPFRLMPRKVTLLIGATMQVTSEGGPQPQSNILFSISNESVALVSAAGLVQGLAIGNGTVSGLVQAVDAETGKVVIISQDLVQVEVLLLRAVRIRAPIMRMRTGTQMPIYVTGITNHQNPFSFGNAVPGLTFHWSVTKRDVLDLRGRHHEASIRLPSQYNFAMNVLGRVKGRTGLRVVVKAVDPTSGQLYGLARELSDEIQVQVFEKLQLLNPEIEAEQILMSPNSYIKLQTNRDGAASLSYRVLDGPEKVPVVHVDEKGFLASGSMIGTSTIGVIAQEPFGANQTIIVAVKVSPVSYLRVSMSPVLHTQNKEALVAVPLGMTVTFTVHFHDNSGDVFHAHSSVLNFATNRDDFVQIGKGPTNNTCVVRTVSVGLTLLRVWDAEHPGLSDFMPLPVLQAISPELSGAMVVGDVLCLATVLTSLEGLSGTWSSSANSILHIDPKTGVAVARAVGSVTVYYEVAGHLRTYKEVVVSVPQRIMARHLHPIQTSFQEATASKVIVAVGDRSSNLRGECTPTQREVIQALHPETLISCQSQFKPAVFDFPSQDVFTVEPQFDTALGQYFCSITMHRLTDKQRKHLSMKKTALVVSASLSSSHFSTEQVGAEVPFSPGLFADQAEILLSNHYTSSEIRVFGAPEVLENLEVKSGSPAVLAFAKEKSFGWPSFITYTVGVLDPAAGSQGPLSTTLTFSSPVTNQAIAIPVTVAFVVDRRGPGPYGASLFQHFLDSYQVMFFTLFALLAGTAVMIIAYHTVCTPRDLAVPAALTPRASPGHSPHYFAASSPTSPNALPPARKASPPSGLWSPAYASH

SEQ ID NO: 907 - protein, 16 aa, Homo sapiens
PLCLALELGWVCLSST

SEQ ID NO: 908 - protein, 302 aa, Homo sapiens
  SITE (262): Xaa equals any of the naturally occurring L-amino acids
  SITE (279): Xaa equals any of the naturally occurring L-amino acids
  SITE (294): Xaa equals any of the naturally occurring L-amino acids
  SITE (295): Xaa equals any of the naturally occurring L-amino acids
MLLLWKNFMYRRRQPVQLLVELLWPLFLFFILVAVRHSHPPLEHHECHFPNKPLPSAGTVPWLQGLICNVNNTCFPQLTPGEEPGRLSNFNDSLVSRLLADARTVLGGASAHRTLAGLGKLIATLRAARSTAQPQPTKQSPLEPPMLDVAELLTSLLRTESLGLALGQAQEPLHSLLEAAEDLAQELLALRSLVELRALLQRPRGTSGPLELLSEALCSVRGPSSTVGPSLNWYEASDLMELVGQEPESACRQQLSPLLGAXWSLDSTRCPLVWNAEAXSSEVLLTDHFTEVMXXERLQSYL

SEQ ID NO: 909 - protein, 37 aa, Homo sapiens
LPWLPFFFSCLVSTLPSMSVSAFSLVVRGRRAFTSVR

SEQ ID NO: 910 - protein, 181 aa, Homo sapiens
  SITE (80): Xaa equals any of the naturally occurring L-amino acids
  SITE (151): Xaa equals any of the naturally occurring L-amino acids
  SITE (162): Xaa equals any of the naturally occurring L-amino acids
PKTSPSPEVSYTTPAPKDVLLPHKPYPEVSQSEPAPLETRGIPFIPMISPSPSQEELQTTLEETDQSTQEPFTTKIPRTXELAKTTQAPHRFYTTVRPRTSDKPHIRPVLNRTTTRPTRPKPSGMPSGNGVGTGVKQAPRPSGADRNVSVXSTHPTKKPGTXRPPLPPSRRGREFPGRRAH

SEQ ID NO: 911 - protein, 161 aa, Homo sapiens
MLSSLGCLLLCGSITLALGNAQKLPKGKRPNLKVHINTTSDSILLKFLRPSPNVKLEGLLLGYGSNVSPNQYFPLPAEGKFTEAIVDAEPKYLIVVRPAPPPSQKKSCSGKTRSRKPLQLVVGTLTPSSVFLSWGFLINPHHDWTLPSHCPNDRFYTIRYR

SEQ ID NO: 912 - protein, 778 aa, Homo sapiens
MLSSLGCLLLCGSITLALGNAQKLPKGKRPNLKVHINTTSDSILLKFLRPSPNVKLEGLLLGYGSNVSPNQYFPLPAEGKFTEAIVDAEPKYLIVVRPAPPPSQKKSCSGKTRSRKPLQLVVGTLTPSSVFLSWGFLINPHHDWTLPSHCPNDRFYTIRYREKDKEKKWIFQICPATETIVENLKPNTVYEFGVKDNVEGGIWSKIFNHKTVVGSKKVNGKIQSTYDQDHTVPAYVPRKLIPITIIKQVIQNVTHKDSAKSPEKAPLGGVILVHLIIPGLNETTVKLPASLMFEISDALKTQLAKNETLALPAESKTPEVEKISARPTTVTPETVPRSTKPTTSSALDVSETTLVLSKRTPETLQTILIPQFELPLSTLAPKSLPEFPEAKTPFPFEKPRGTLASSEKPWIVPTAKISEDSKVLQPQTATYDVFSSPTTSDEPEISDSYTATSDRILDSIPPKTSRTLEQPRATLAPSETPFVPQKLEIFTSPEMQPTTPAPQQTTSIPSTPKRRPRPKPPRTKPERTTSAGTITPKISKSPEPTWTTPAPGKTQFISLKPKIPLSPEVTHTKPAPKQTPRAPPKPKTSPRPRIPQTQPVPKVPQRVTAKPKTSPSPEVSYTTPAPKDVLLPHKPYPEVSQSEPAPLETRGIPFIPMISPSPSQEELQTTLEETDQSTQEPFTTKIPRTTELAKTTQAPHRFYTTVRPRTSDKPHIRPVLNRTTTRPTRPKPSGMPSGNGVGTGVKQAPRPSGADRNVSVDSTHPTKKPGTRRPPLPP

SEQ ID NO: 913 - protein, 132 aa, Homo sapiens
  SITE (70): Xaa equals any of the naturally occurring L-amino acids
SFRTAPRGPHVKESHASGLLSNQINLQSFDFKRMLLCRLNITGLCWGPKRTRCALGGQTGLQHHPSNEKXRHSGKEDLFLSICLGWGTTVNMACNNQRGRGYQTQRNSSPVYQEELLFFCTSLFSRLFSLKG

SEQ ID NO: 914 - protein, 33 aa, Homo sapiens
MNHLSISIALFLLCCVHLSLGLSVFPFQEDRSV

SEQ ID NO: 915 - protein, 102 aa, Homo sapiens [sequence omitted]

SEQ ID NO: 916 - protein, 85 aa, Homo sapiens
IKTVFLGQRYTDPNFIAVVFIHLPIDILKAPARPGTVAHACNLSTLVGRGGRITRSRDQDHPGQRGETLSLLKIQKLAGHGGARL

SEQ ID NO: 917 - protein, 33 aa, Homo sapiens
MISCLCNFIAHCVALVMRTCMLVVSSNFAPSFL

SEQ ID NO: 918 - protein, 33 aa, Homo sapiens; identical to SEQ ID NO: 917

SEQ ID NO: 919 - protein, 101 aa, Homo sapiens [sequence omitted]

SEQ ID NO: 920 - protein, 60 aa, Homo sapiens
MRKWGLMKLIASMMQPVLLELLSVWRKEGRDSRNIHDSHSMYVLRKRLSGSWLQQVCTLL

SEQ ID NO: 921 - protein, 79 aa, Homo sapiens [sequence omitted]

SEQ ID NO: 922 - protein, 245 aa, Homo sapiens
MADVSAKDSSQETLVNLAGLLVSLLMLPLVSGCPGFSLGCFFFLTALHIYANYRAVRALVMETLNEGRLRLVLKHYLQRGEVLDPTAANRMEPLWTGFWPAPSLSLGVPLHRLVSSVFELQQLVEGHQESYLLCWDQSQNQVQVVLNQKAGPKTILRAATHGLMLGALQGDGPLPAELEELRNRVRAGPKKESWVVVKETHEVLDMLFPKFLKGLQDAGWKTEKHQLEVDEWRATWLLSPEKKVL

SEQ ID NO: 923 - protein, 75 aa, Homo sapiens
  SITE (62): Xaa equals any of the naturally occurring L-amino acids
  SITE (63): Xaa equals any of the naturally occurring L-amino acids
LPVQNGCPESAMEMNGRAPCWEVGLEELSSRKLTAGPQFPSEPQAPAPSLFRQCLLWFCGMXXGGVGSPPPLTQE

SEQ ID NO: 924 - protein, 186 aa, Homo sapiens
MLPLVSGCPGFSLGCFFFLTALHIYANYRAVRALVMETLNEGRLRLVLKHYLQRGEVLDPTAANRMEPLWTGFWPAPSLSLGVPLHRLVSSVFELQQLVEGHQESYLLCWDQSQNQVQVVLNQKAGPKTILRAATHGLMLGALQGDGPLPAELEELRNRVRAGPRKRAGSSSRRHTKCWTCCSQSS

SEQ ID NO: 925 - protein, 40 aa, Homo sapiens
MRRQTFMSILVFQCSPISFGLCINKERTVVSSVITDNLCL

SEQ ID NO: 926 - protein, 40 aa, Homo sapiens; identical to SEQ ID NO: 925

SEQ ID NO: 927 - protein, 73 aa, Homo sapiens
  SITE (60): Xaa equals any of the naturally occurring L-amino acids
SLLLSCCPLGNRAYGATGAEVASRASLEGSEHSMQRSHREAGNQGPGRAASCASPAFVMXFSFFTHCQICFLP

SEQ ID NO: 928 - protein, 7 aa, Homo sapiens
EAPWQFS

SEQ ID NO: 929 - protein, 23 aa, Homo sapiens
MFLKAQWLYSLLLNCLLPEGTSS

SEQ ID NO: 930 - protein, 23 aa, Homo sapiens
MFLKAQWLYSLLLNCLLPEGTSS

SEQ ID NO: 931 - protein, 64 aa, Homo sapiens
RTLRMSPSAFCYSLTLLACWRAAWIPTCVPRAAGEMDSPGLADGHWCSGAARRSPHYVARSLVL

SEQ ID NO: 932 - protein, 822 aa, Homo sapiens
MAAAVVVAEGDSDSRPGQELLVAWNTVSTGLVPPAALGLVSSRTSGAVPPKEEELRAAVEVLRGHGLHSVLEEWFVEVLQNDLQANISPEFWNAISQCENSADEPQCLLLLLDAFGLLESRLDPYLRSLELLEKWTRLGLLMGTGAQGLREEVHTMLRGVLFFSTPRTFQEMIQRLYGCFLRVYMQSKRKGEGGTDPELEGELDSRYARRRYYRLLQSPLCAGCSSDKQQCWCRQALEQFHQLSQVLHRLSLLERVSAEAVTTTLHQVTRERMEDRCRGEYERSFLREFHKWIERVVGWLGKVFLQDGPARPASPEAGNTLRRWRCHVQRFFYRIYASLRIEELFSIVRDFPDSRPAIEDLKYCLERTDQRQQLLVSLKAALETRLLHPGVNTCDIITLYISAIKALRVLDPSMVILEVACEPIRRYLRTREDTVRQIVAGLTGDSDGTGDLAVELSKTDPASLETGQDSEDDSGEPEDWVPDPVDADPGKSSSKRRSSDIISLLVSIYGSKDLFINEYRSLLADRLLHQFSFSPEREIRNVELLKLRFGEAPMHFCEVMLKDMADSRRINANIREEDEKRPAEEQPPFGVYAVILSSEFWPPFKDEKLEVPEDIRAALEAYCKKYEQLKAMRTLSWKHTLGLVTMDVELADRTLSVAVTPVQAVILLYFQDQASWTLEELSKAVKMPVALLRRRMSVWLQQGVLREEPPGTFSVIEEERPQDRDNMVLIDSDDESDSGMASQADQKEEELLLFWTYIQAMLTNLESLSLDRIYNMLRMFVVTGPALAEIDLQELQGYLQKKVRDQQLVYSAGVYRLPKNCS

SEQ ID NO: 933 - protein, 157 aa, Homo sapiens
MSPWLLLLLVVGSWLLARILAWTYAFYNNCRRLQCFPQPPKRNWFWGHLGLITPTEEGLKDSTQMSATYSQGFTVWLGPIIPFIVLCHPDTIRSITNASAAIAPKDNLFIRFLKPWLGEYLQVKGVGDNLAGRVGEVLLLPIVLGCPTRRRDTAEWR

SEQ ID NO: 934 - protein, 13 aa, Homo sapiens
LVIGGWGQRRLYR

SEQ ID NO: 935 - protein, 126 aa, Homo sapiens
  SITE (119): Xaa equals any of the naturally occurring L-amino acids
MSPWLLLLLVVGSWLLARILAWTYAFYNNCRRLQCFPQPPKRNWFWGHLGLITPTEEGLKDSTQMSATYSQGFTVWLGPIIPFIVLCHPDTIRSITNASAAIAPKDNLFIRFLKPWLGXRDTAEWR

SEQ ID NO: 936 - protein, 90 aa, Homo sapiens
  SITE (22): Xaa equals any of the naturally occurring L-amino acids
  SITE (25): Xaa equals any of the naturally occurring L-amino acids
  SITE (26): Xaa equals any of the naturally occurring L-amino acids
QNTIECGSSTAGVCCSQLWRLXVQXXGTGRLHVWWGPASWSIASTFSLHPYVVEEAGELSGVSFVTPFLRLVHSHDLITSQRPCLLTPLP

SEQ ID NO: 937 - protein, 58 aa, Homo sapiens [sequence omitted]

SEQ ID NO: 938 - protein, 34 aa, Homo sapiens
LCVSHPGITCTPLWLCVISQNMELILMFRRPKLT

SEQ ID NO: 939 - protein, 6 aa, Homo sapiens
TLTAKT

SEQ ID NO: 940 - protein, 58 aa, Homo sapiens [sequence omitted]

SEQ ID NO: 941 - protein, 44 aa, Homo sapiens
  SITE (3): Xaa equals any of the naturally occurring L-amino acids
LKXITICCLQKTHLHSKGTERMKVKGWERVYWGNITEGNMMNLY

SEQ ID NO: 942 - protein, 9 aa, Homo sapiens
LGAFSWSPK

SEQ ID NO: 943 - protein, 96 aa, Homo sapiens
MARSLLIILGADFTFPTSFNCFQKMNLAKKSRGSFTHLLTHSWCLSLFLKEADQGLRENNFDFSHVCPSKPPLWTDSPSVPGRNWDNPRTFLVPSR

SEQ ID NO: 944 - protein, 96 aa, Homo sapiens; identical to SEQ ID NO: 943

SEQ ID NO: 945 - protein, 26 aa, Homo sapiens
  SITE (3): Xaa equals any of the naturally occurring L-amino acids
  SITE (5): Xaa equals any of the naturally occurring L-amino acids
MLXFXFFLLFFFFFWWCCLAFFSFPF

SEQ ID NO: 946 - protein, 77 aa, Homo sapiens [sequence omitted]

SEQ ID NO: 947 - protein, 77 aa, Homo sapiens [sequence omitted]

SEQ ID NO: 948 - protein, 11 aa, Homo sapiens
MWRWLSSFWLL

SEQ ID NO: 949 - protein, 11 aa, Homo sapiens
MWRWLSSFWLL

SEQ ID NO: 950 - protein, 378 aa, Homo sapiens
AREKPYLVEEAVSYNELDYVSVGLDQQTVKLVCTNRRKQFLLDTADVALAEFFLASLKSAMIKGCREPPYPSILTDATMEKLALAKFVAQESKCEASAVTVRFYGLVHWEDPTDESLGPTPCHCSPPEGTITKEGMLHYKAGTSYLGKEHWKTCFVVLSNGILYQYPDRTDVIPLLSVNMGGEQCGGCRRANTTDRPHAFQVILSDRPCLELSAESEAEMAEWMQHLCQAVSKGVIPQGVAPSPCIPCCLVLTDDRLFTCHEDCQTSFFRSLGTAKLGDISAVSTEPGKEYCVLEFSQDSQQLLPPWVIYLSCTSELDRLLSALNSGWKTIYQVDLPHTAIQEASNKKKFEDALSLIHSAWQRSDSLCRGRASRDPWC

SEQ ID NO: 951 - protein, 134 aa, Homo sapiens
SPARHPTTSSRHTWWESGNAVPPGSPFHGRPLLLLQPAGPVPFQDQPFDPSQGPWPGLHCRPQGLMHSMCLPDLTPEDGGKAQDHTALGHSREQDTPGVQENFQGAAPLDRYTRRFNTLYYLGNQRRGIIKTRK

SEQ ID NO: 952 - protein, 58 aa, Homo sapiens
MATASINNLISSLLLHLSLLSSKAGKFLIWKEHKTACGCYANSTCLLPNGLSNHKGKS

SEQ ID NO: 953 - protein, 58 aa, Homo sapiens; identical to SEQ ID NO: 952

SEQ ID NO: 954 - protein, 63 aa, Homo sapiens
ENKRLHFGEASTLSGLLFCFMSWCLGEDLAGFIQSGRVWAILENVPSISENKSAPSTCLHPGD

SEQ ID NO: 955 - protein, 77 aa, Homo sapiens
MAGLGLLSLVQFSVTGGHWTGIADSLVATLGCRLSGSVPPPLLPAPSGHSRALHQTLTWCLHLLSLSPSSNPWKSLV

SEQ ID NO: 956 - protein, 77 aa, Homo sapiens; identical to SEQ ID NO: 955

SEQ ID NO: 957 - protein, 27 aa, Homo sapiens
MRARTLPPSLLCLWCLAPYLNICWMNG

SEQ ID NO: 958 - protein, 28 aa, Homo sapiens
  SITE (14): Xaa equals any of the naturally occurring L-amino acids
AQWLTPVIPALWWXEEGGSPEVRSSRPA

SEQ ID NO: 959 - protein, 27 aa, Homo sapiens
MRARTLPPSLLCLWCLAPYLNICWMNG

SEQ ID NO: 960 - protein, 13 aa, Homo sapiens
PPRASWSPREHVL

SEQ ID NO: 961 - protein, 70 aa, Homo sapiens
  SITE (2): Xaa equals any of the naturally occurring L-amino acids
  SITE (3): Xaa equals any of the naturally occurring L-amino acids
MXXHESILLVSLDLLPTSILLVSLWICSPPPSSWVNPGSFVGYLERKRQKLICQMTRTNRLFGMKRKTSG

SEQ ID NO: 962 - protein, 53 aa, Homo sapiens
  SITE (47): Xaa equals any of the naturally occurring L-amino acids
SLALNSPPPGLRVPREERLLATSLLQGALPAGPCPSTTLLSWHRPAXPPGAQG

SEQ ID NO: 963 - protein, 65 aa, Homo sapiens
SILLVSLDLLPTSILLVSLWICSPPPSSWVNPGSFVGYLERKRQKLICQMTRTNRLFGMKRKTSG

SEQ ID NO: 964 - protein, 3 aa, Homo sapiens
DLK

SEQ ID NO: 965 - protein, 9 aa, Homo sapiens
MNEKFLPPL

SEQ ID NO: 966 - protein, 51 aa, Homo sapiens
MLRPPRWALMAASSHPPPLWSWVLGLAAHPTGMSPGTGPHHGWVSASSSSS

SEQ ID NO: 967 - protein, 244 aa, Homo sapiens
  SITE (25): Xaa equals any of the naturally occurring L-amino acids
  SITE (40): Xaa equals any of the naturally occurring L-amino acids
  SITE (41): Xaa equals any of the naturally occurring L-amino acids
  SITE (43): Xaa equals any of the naturally occurring L-amino acids
  SITE (231): Xaa equals any of the naturally occurring L-amino acids
  SITE (237): Xaa equals any of the naturally occurring L-amino acids
MRAPFNTLFGRLFGLLLVAIVLAHXLAFFWFHHYGPPPPXXAXFVEQPDGSLTPLRKAPRPWFGGPVVPLTFQFISLIIAAWYGAKLLSRPIQRLSAAAERLSVDLDSPPLVETGPREARQAASTFNLMQKRIREQVSQRARMLGAVSHDLRTPLSRLKLRLEQIEDPKLQGQMRQDLDDMIGMLDATLSYLHEQRTSETRHWLDVQALVESLSENAQDQGRDVQFFFGGXPPGGGXPKTPPPF

SEQ ID NO: 968 - protein, 244 aa, Homo sapiens
  SITE (231): Xaa equals any of the naturally occurring L-amino acids
  SITE (237): Xaa equals any of the naturally occurring L-amino acids
MRAPFNTLFGRLFGLLLVAIVLAHVLAFFWFHHYGPPPPPRAAFVEQPDGSLTPLRKAPRPWFGGPVVPLTFQFISLIIAAWYGAKLLSRPIQRLSAAAERLSVDLDSPPLVETGPREARQAASTFNLMQKRIREQVSQRARMLGAVSHDLRTPLSRLKLRLEQIEDPKLQGQMRQDLDDMIGMLDATLSYLHEQRTSETRHWLDVQALVESLSENAQDQGRDVQFFFGGXPPGGGXPKTPPPF

SEQ ID NO: 969 - protein, 85 aa, Homo sapiens
GIGSRVRAAFIALEPSLGMGFSKNWQAHRLPSKWVRTAYPSIETHYLFYLFLSGSGARCSYFSHLRWDILGQTREILEAISVVNP

SEQ ID NO: 970 - protein, 54 aa, Homo sapiens
  SITE (34): Xaa equals any of the naturally occurring L-amino acids
  SITE (35): Xaa equals any of the naturally occurring L-amino acids
  SITE (46): Xaa equals any of the naturally occurring L-amino acids
MKTVSLLLTLWFSQTFSFNLFFAPPHSLLQSSIXXSVSSITTVHPXLGLLFCIL

SEQ ID NO: 971 - protein, 37 aa, Homo sapiens
ILLGLWQSVLGSSIWGQPLSYNCQEPHNCLFNHSDFK

SEQ ID NO: 972 - protein, 56 aa, Homo sapiens
MKTVSLLLTLWFSQTFSFNLFFAPPHSLLQSSIFFSVSSITTVHPILVFFFAFFRT

SEQ ID NO: 973 - protein, 65 aa, Homo sapiens
KLTQAGSGYVHREIFPRVCFFDILSPSFYLLAGISCPTTPVIICKPLYSFQCLKVIHKEGRNKRV

SEQ ID NO: 974 - protein, 11 aa, Homo sapiens
MTLSNWEYGFH

SEQ ID NO: 975 - protein, 60 aa, Homo sapiens [sequence omitted]

SEQ ID NO: 976 - protein, 24 aa, Homo sapiens
ICLWGRPNLTTQGTLKGISGRRSQ

SEQ ID NO: 977 - protein, 128 aa, Homo sapiens
PETFLLVTGSQWGILGCQGPRVTCVQLFYGSRGLSLRQATKCPGCHPPWSPSVPHAWSPASPRIPVAFISGQLPARPGLGHGLRHEARPPPAPLPRGSSIPLHFWNVCASMMFVYLRHLKIYFRYEGK

SEQ ID NO: 978 - protein, 23 aa, Homo sapiens
ICLWGRPNLTTQGTLKGISGRRS

SEQ ID NO: 979 - protein, 78 aa, Homo sapiens
RHLQVGGGQHQCGQACLDSSYRPLLCMMWEPGHSHAPSRAQGCGSTTEHPLSHCPPLPRALPSPPLLHHSSFKVPLLY

SEQ ID NO: 980 - protein, 98 aa, Homo sapiens
  SITE (72): Xaa equals any of the naturally occurring L-amino acids
MPLQRRVKVKTTSSRCLPGTTWGLTLFSMLCCFWPLGIAAFYFSQGTSKAISKGDFRLASTTSRRALFLATXAIAVGAGLYVAVVVALAAYMSQNGHG

SEQ ID NO: 981 - protein, 68 aa, Homo sapiens
MPLQRRVKVKTTSSRCLPGTTWDLLSSPCSAASGHWALLPSTSPRGPARPSPKGTSAWPAPPPAGPSS

SEQ ID NO: 982 - protein, 68 aa, Homo sapiens
  SITE (25): Xaa equals any of the naturally occurring L-amino acids
  SITE (51): Xaa equals any of the naturally occurring L-amino acids
  SITE (56): Xaa equals any of the naturally occurring L-amino acids
MLLPLFTLLILLLRVFPKEIIQNRXKLKAEKCWNMTLFIAVGKMGGWGTWXMLEIXALCEGPVGEDAL

SEQ ID NO: 983 - protein, 8 aa, Homo sapiens
RVFPVTTL

SEQ ID NO: 984 - protein, 32 aa, Homo sapiens
MLLPLFTLLILLLRVFPKEIIQNRKKLKAEKC

SEQ ID NO: 985 - protein, 10 aa, Homo sapiens
MGLFLFLVSS

SEQ ID NO: 986 - protein, 10 aa, Homo sapiens
MGLFLFLVSS

SEQ ID NO: 987 - protein, 56 aa, Homo sapiens
MLTGVISGSTGAMALSLASLSAHCFAFRCLAAPFYFFAGLGKHGRRILISFLFSAW

SEQ ID NO: 988 - protein, 56 aa, Homo sapiens; identical to SEQ ID NO: 987

SEQ ID NO: 989 - protein, 56 aa, Homo sapiens
  SITE (3): Xaa equals any of the naturally occurring L-amino acids
  SITE (46): Xaa equals any of the naturally occurring L-amino acids
AEXAPLHFHLGDGERLHLKKKKNKKKKPKQGWARWLTPVISALLEXGAGVSPEVMS

SEQ ID NO: 990 - protein, 29 aa, Homo sapiens
MLVIIIMTALVSHVPSVHSVPHAVPFTSS

SEQ ID NO: 991 - protein, 29 aa, Homo sapiens
MLVIIIMTALVSHVPSVHSVPHAVPFTSS

SEQ ID NO: 992 - protein, 60 aa, Homo sapiens
  SITE (7): Xaa equals any of the naturally occurring L-amino acids
  SITE (34): Xaa equals any of the naturally occurring L-amino acids
VFKTIRXREIILYHENSTGKTHPHDSLISHWVPXTTQGNYGSYKMRFGWGHRARPYQPPK

SEQ ID NO: 993 - protein, 53 aa, Homo sapiens
  SITE (28): Xaa equals any of the naturally occurring L-amino acids
MDIQGKALYIRFLLTLCQMVVSVMGKRXQGRRGLGGAAAVGREICRRWGCCVT

SEQ ID NO: 994 - protein, 12 aa, Homo sapiens
LCWTRSSVIGAH

SEQ ID NO: 995 - protein, 53 aa, Homo sapiens
MDIQGKALYIRFLLTLCQMVVSVMGKRRQGRRGLGGAAAVGREICRRWGCCVT

SEQ ID NO: 996 - protein, 53 aa, Homo sapiens
  SITE (21): Xaa equals any of the naturally occurring L-amino acids
KQGSLLGWSRVIMVRGAQSYXKGVLCRHWKKFGFYSKWNWKPLECFQNRSDVI

SEQ ID NO: 997 - protein, 53 aa, Homo sapiens
MRLILFAMSPKLLFLFLFLYISVKSFDLVLSFRSVLFMSDLIHCFYHQLHFKL

SEQ ID NO: 998 - protein, 53 aa, Homo sapiens; identical to SEQ ID NO: 997

SEQ ID NO: 999 - protein, 79 aa, Homo sapiens
  SITE (34): Xaa equals any of the naturally occurring L-amino acids
LGIWLIPGLRRANPKISLEYLMVPENKYSKNCEXMLKGLRSQPEGAANGQSWNNSNKVNKYSIGLLLNKCMIHESTLKD

SEQ ID NO: 1000 - protein, 43 aa, Homo sapiens
MFHRFFILSALSRIRALTTFLDDLGMTHQTLLLLLGPSIYSFC

SEQ ID NO: 1001 - protein, 43 aa, Homo sapiens; identical to SEQ ID NO: 1000

SEQ ID NO: 1002 - protein, 111 aa, Homo sapiens
  SITE (45): Xaa equals any of the naturally occurring L-amino acids
  SITE (99): Xaa equals any of the naturally occurring L-amino acids
  SITE (104): Xaa equals any of the naturally occurring L-amino acids
  SITE (108): Xaa equals any of the naturally occurring L-amino acids
  SITE (109): Xaa equals any of the naturally occurring L-amino acids
  SITE (111): Xaa equals any of the naturally occurring L-amino acids
VQVLTQYYQSNILNILSQVICLSIVYFEGFLSFTFNLFFISISSXVALSYSYPDIHLISEGLDITLVKMQSDLILFLKQTAVLLERPRAHRFSTRVGYXVSVHXSGSXXVX

SEQ ID NO: 1003 - protein, 43 aa, Homo sapiens
  SITE (13): Xaa equals any of the naturally occurring L-amino acids
MLYVRLLKNTKIXVLILPLFILFLTLFLFIPNGFLFVFVSLYF

SEQ ID NO: 1004 - protein, 118 aa, Homo sapiens [sequence omitted]

SEQ ID NO: 1005 - protein, 64 aa, Homo sapiens
  SITE (55): Xaa equals any of the naturally occurring L-amino acids
  SITE (59): Xaa equals any of the naturally occurring L-amino acids
  SITE (63): Xaa equals any of the naturally occurring L-amino acids
SIKSCSSFYLGSRVNRAQLTNYPPAMRTYVYECHCDKSTSRATAGPSIFHPGGVXGMWXIFAXV

SEQ ID NO: 1006 - protein, 42 aa, Homo sapiens
  SITE (21): Xaa equals any of the naturally occurring L-amino acids
  SITE (23): Xaa equals any of the naturally occurring L-amino acids
  SITE (42): Xaa equals any of the naturally occurring L-amino acids
HSPESCYSFNLGSRMRISVEXKXAKSNSAADNPETLRKGYVX

SEQ ID NO: 1007 - protein, 76 aa, Homo sapiens
MLVLLSLLASGGLPLLLVGDVLASKSSTVLFLPGDSSPGCSMITPLPPSRMCLKAGSSGEQTVVPLSLLLRSKSSK

SEQ ID NO: 1008 - protein, 76 aa, Homo sapiens
  SITE (71): Xaa equals any of the naturally occurring L-amino acids
MLVLLSLLASGGLPLLLVGDVLASKSSTVLFLPGDSSPGCSMITPLPPSRMCLKAGSSGEQTVVPLSLLLXSKSSK

SEQ ID NO: 1009 - protein, 9 aa, Homo sapiens
CHLQHSCRE

SEQ ID NO: 1010 - protein, 34 aa, Homo sapiens
MTALFCSLLHSLVSLLLPTKWGQGKAFLTGPLFS

SEQ ID NO: 1011 - protein, 10 aa, Homo sapiens
FSCCLSLPIS

SEQ ID NO: 1012 - protein, 71 aa, Homo sapiens
MWCLVFCSCVSLPRMMASSFIHDIAKDMISFLFMSAWYYTYFNSFEIYRFQFTFIEYSLWVKHHASLPGVQ

SEQ ID NO: 1013 - protein, 71 aa, Homo sapiens; identical to SEQ ID NO: 1012

SEQ ID NO: 1014 - protein, 74 aa, Homo sapiens
ARREGRSRTAVGSTPAAPLSLTRGGQCPSRGSPLALFGHPLASQKHSETKTFPFPPPHMVLRLPAAMQLKQLIF

SEQ ID NO: 1015 - protein, 21 aa, Homo sapiens
MSLSLISLSFLFPAGAGRRSC

SEQ ID NO: 1016 - protein, 21 aa, Homo sapiens
MSLSLISLSFLFPAGAGRRSC

SEQ ID NO: 1017 - protein, 25 aa, Homo sapiens
MLHWGVLCSLFLMLFNEGASASLQQ

SEQ ID NO: 1018 - protein, 55 aa, Homo sapiens
MLHWGVLCSLFLMLFNEGASASLSNKRSMREDRAVHGYGYWTRIFGKVKADHWIW

SEQ ID NO: 1019 - protein, 95 aa, Homo sapiens
  SITE (13): Xaa equals any of the naturally occurring L-amino acids
MRACLCAGVCMCXASCLGLPMNVVECYTWRVLVFHQFQDEELHDTVDLETIPLERQPRDVQHPVSTRILYLHVYFVAVTLTLIRILQLWTEAFSP

SEQ ID NO: 1020 - protein, 261 aa, Homo sapiens
MELLQVTILFLLPSICSSNSTGVLEAANNSLVVTTTKPSITTPNTESLQKNVVTPTTGTTPKGTITNELLKMSLMSTATFLTSKDEGLKATTTDVRKNDSIISNVTVTSVTLPNAVSTLQSSKPKTETQSSIKTTEIPGSVLQPDASPSKTGTLTSIPVTIPENTSQSQVIGTEGGKNASTSATSRSYSSIILPVVIALIVITLSVFVLVGLYRMCWKADPGTPENGNDQPQSDKESVKLLTVKTISHESGEHSAQGKTKN

SEQ ID NO: 1021 - protein, 260 aa, Homo sapiens [sequence omitted]

SEQ ID NO: 1022 - protein, 53 aa, Homo sapiens
CVLEPTSSQSIAPDLGRESTFSIQRNKNMQFMVVLWTLTDCEGKVYPKAVICR

SEQ ID NO: 1023 - protein, 41 aa, Homo sapiens
MMLPVISLFLISLHLPIFCFQRLLLFKGFLFIANSSNLHIK

SEQ ID NO: 1024 - protein, 41 aa, Homo sapiens; identical to SEQ ID NO: 1023

SEQ ID NO: 1025 - protein, 162 aa, Homo sapiens
  SITE (16): Xaa equals any of the naturally occurring L-amino acids
  SITE (17): Xaa equals any of the naturally occurring L-amino acids
  SITE (18): Xaa equals any of the naturally occurring L-amino acids
KTVMLPIAQEVQSPVXXXCDKLAADCAHELRRHGVSCVSLWPGIVQTELLKEHMAKEEVLQDPVLKQFKSAFSSAETTELSGKCVVALATDPNILSLSGKVLPSCDLARRYGLRDVDGRPVQDYLSLSSVLSHVSGLGWLASYLPSFLRVPKWIIALYTSKF

SEQ ID NO: 1026 - protein, 45 aa, Homo sapiens
MARWLLPCLPPLHSVTSWLLTVPTSCGAMGSAVCLCGRGLCRQNC

SEQ ID NO: 1027 - protein, 37 aa, Homo sapiens
  SITE (29): Xaa equals any of the naturally occurring L-amino acids
LPPFPQCDKLAADCPTSCGAMGSAVCLCXRGLCRQNC

SEQ ID NO: 1028 - protein, 45 aa, Homo sapiens; identical to SEQ ID NO: 1026

SEQ ID NO: 1029 - protein, 29 aa, Homo sapiens
MDQFLQYLLECMLLCTTAGASGATYVPTR

SEQ ID NO: 1030 - protein, 42 aa, Homo sapiens
MDQFLQYLLECMLLCTTAGASGAHLCTNEMTLLEAILYLQWM

SEQ ID NO: 1031 - protein, 53 aa, Homo sapiens
CLILQEENRKELSNLANRYKIDSRVLSPTLGWQPVGQTPKTVADVFFCLPSLG

SEQ ID NO: 1032 - protein, 56 aa, Homo sapiens [sequence omitted]

SEQ ID NO: 1033 - protein, 4 aa, Homo sapiens
VWMP

SEQ ID NO: 1034 - protein, 56 aa, Homo sapiens [sequence omitted]

SEQ ID NO: 1035 - protein, 491 aa, Homo sapiens
  SITE (42): Xaa equals any of the naturally occurring L-amino acids
  SITE (43): Xaa equals any of the naturally occurring L-amino acids
  SITE (44): Xaa equals any of the naturally occurring L-amino acids
AARVGRHGRRRRSAAMAGRGGSALLALCGALAACGWLLGAEXXXPGAPAAGMRRRRRLQQEDGISFEYHRYPELREALVSVWLQCTAISRIYTVGRSFEGRELLVIELSDNPGVHEPGEPEFKYIGNMHGNEAVGRELLIFLAQYLCNEYQKGNETIVNLIHSTRIHIMPSLNPDGFEKAASQPGELKDWFVGRSNAQGIDLNRNFPDLDRIVYVNEKEGGPNNHLLKNMKKIVDQNTKLAPETKAVIHWIMDIPFVLSANLHGGDLVANYPYDETRSGSAHEYSSSPDDAIFQSLARAYSSFNPAMSDPNRPPCRKNDDDSSFVDGTTNGGAWYSVPGGMQDFNYLSSNCFEITVELSCEKFPPEETLKTYWEDNKNSLISYLEQIHRGVKGFVRDLQGNPIANATISVEGIDHDVTSAKDGDYWRLLIPGNYKLTASAPGYLAITKKVAVPYSPAAGVDFELESFSERKEEEKEELMEWWKMMSETLNF

SEQ ID NO: 1036 - protein, 255 aa, Homo sapiens
LLLWTMSVIFFACVVRVRDGLPLSASTDFYHTQDFLEWRRRLKSLALRLAQYPGRGSAEGCDFSIHFSSFGDVACMAICSCQCPAAMAFCFLETLWWEFTASYDTTCIGLASRPYAFLEFDSIIQKVKWHFNYVSSSQMECSLEKIQEELKLQPPAVLTLEDTDVANGVMNGHTPMHLEPAPNFRMEPVTALGILSLILNIMCAALNLIRGVHLAEHSLQVAHEEIGNILAFLVPFVACIFQDPRSWFCWLDQTS

SEQ ID NO: 1037 - protein, 99 aa, Homo sapiens
  SITE (44): Xaa equals any of the naturally occurring L-amino acids
MLLLLVFLVACFINRKCQKQRKKKPAEDILEEYPLNTKVEVPKXHPDRVEKNVNRHYCTVRNVNILSEPEAAYTFKGAKVKRLNLEVRVHNNLQDGTEV

SEQ ID NO: 1038 - protein, 5 aa, Homo sapiens
MPVLL

SEQ ID NO: 1039 - protein, 99 aa, Homo sapiens
MLLLLVFLVACFINRKCQKQRKKKPAEDILEEYPLNTKVEVPKRHPDRVEKNVNRHYCTVRNVNILSEPEAAYTFKGAKVKRLNLEVRVHNNLQDGTEV

SEQ ID NO: 1040 - protein, 70 aa, Homo sapiens
LLDLTNRLVTCIDQSKPNILASLSLAEQTRVGIWVGAFSIKDNLSLCSQGEHLCFVLKAGSPWFANCLQE

SEQ ID NO: 1041 - protein, 48 aa, Homo sapiens
MLQYTWLILVFLSSCLSATWFCKVVVAAIGSTVGSSRLHFKRSGQCLR

SEQ ID NO: 1042 - protein, 48 aa, Homo sapiens; identical to SEQ ID NO: 1041

SEQ ID NO: 1043 - protein, 52 aa, Homo sapiens
  SITE (39): Xaa equals any of the naturally occurring L-amino acids
MVAVDFSCLSFILLGILVLYIYFVMYACSIPTLFSVFYXEEMLNLSKLSCIY

SEQ ID NO: 1044 - protein, 13 aa, Homo sapiens
CFHFFLCPILVLV

SEQ ID NO: 1045 - protein, 1 aa, Homo sapiens
C

SEQ ID NO: 1046 - protein, 37 aa, Homo sapiens
MVAVDFSCLSFILLGILVLYIYFVMYACSIPTLFSVL

SEQ ID NO: 1047 - protein, 6 aa, Homo sapiens
NLSKII

SEQ ID NO: 1048 - protein, 183 aa, Homo sapiens [sequence omitted]

SEQ ID NO: 1049 - protein, 183 aa, Homo sapiens [sequence omitted]

SEQ ID NO: 1050 - protein, 31 aa, Homo sapiens
  SITE (9): Xaa equals any of the naturally occurring L-amino acids
PGPPLSFFXFFFFFFFFFFFFFFKHCIQVSL

SEQ ID NO: 1051 - protein, 63 aa, Homo sapiens
  SITE (54): Xaa equals any of the naturally occurring L-amino acids
MNHCCSSQRFLNILSFCISPPFPLTFIYLIMYLFIYLYTFAPFSTNTKQSKKKXYIYISVYVL

SEQ ID NO: 1052 - protein, 63 aa, Homo sapiens
MNHCCSSQRFLNILSFCISPPFPLTFIYLIMYLFIYLYTFAPFSTNTKQSKKKKYIYISVYVL

SEQ ID NO: 1053 - protein, 75 aa, Homo sapiens
  SITE (9): Xaa equals any of the naturally occurring L-amino acids
ADNNFTQEXAMTMITPSSKLTLTKGNKSWSSTAVAAALELVDPPGCRNSARDNQFILLNWHILNHDSQQLGNIFF

SEQ ID NO: 1054 - protein, 113 aa, Homo sapiens
  SITE (31): Xaa equals any of the naturally occurring L-amino acids
  SITE (79): Xaa equals any of the naturally occurring L-amino acids
  SITE (102): Xaa equals any of the naturally occurring L-amino acids
  SITE (111): Xaa equals any of the naturally occurring L-amino acids
CGVFWLLSLLCCIKEQQFEQVVALLLQSIRXCQDRALLVNNAYQGLASLVKVSELAAFKVVVQEEGGSGLSLIKETYQXHRGRTRRWWENVGMLLVPPGFLXRRSCRSWCXVV

SEQ ID NO: 1055 - protein, 2 aa, Homo sapiens
IL

SEQ ID NO: 1056 - protein, 161 aa, Homo sapiens
MAEASCGVFWLLSLLCCIKEQQFEQVVALLLQSIRLCQDRALLVNNAYQGLASLVKVSELAAFKVVVQEEGGSGLSLIKETYQLHRDDPEVVENVGMLLVHLASYEEILPELVSSSMKALLQEIKERFTSSLELVSCVEKVLLRLEAATSPSPLGGEAAQP

SEQ ID NO: 1057 - protein, 491 aa, Homo sapiens; identical to SEQ ID NO: 1035
  SITE (42): Xaa equals any of the naturally occurring L-amino acids
  SITE (43): Xaa equals any of the naturally occurring L-amino acids
  SITE (44): Xaa equals any of the naturally occurring L-amino acids

SEQ ID NO: 1058 - protein, 79 aa, Homo sapiens
  SITE (15): Xaa equals any of the naturally occurring L-amino acids
  SITE (21): Xaa equals any of the naturally occurring L-amino acids
  SITE (49): Xaa equals any of the naturally occurring L-amino acids
  SITE (65): Xaa equals any of the naturally occurring L-amino acids
  SITE (66): Xaa equals any of the naturally occurring L-amino acids
MRLASSLSVFPLLPXTCGHSXALLPSSIGQHSETFTRCRPLTFPVFRTXKPMNPYEITQFCGILXXATQTGLKTGTLHG

SEQ ID NO: 1059 - protein, 20 aa, Homo sapiens
REKSSLSVPVLVCLCCYNRI

SEQ ID NO: 1060 - protein, 244 aa, Homo sapiens
LVPLVFSLLVQSCKQVYRSIAMKFVPCLLLVTLSCLGTLGQAPRQKQGSTGEEFHFQTGGRDSCTMRPSSLGQGAGEVWLRVDCRNTDQTYWCEYRGQPSMCQAFAADPKSYWNQALQELRRLHHACQGAPVLRPSVCREAGPQAHMQQVTSSLKGSPEPNQQPEAGTPSLRPKATVKLTEATQLGKDSMEELGKAKPTTRPTAKPTQPGPRPGGNEEAKKKAWEHCWKPFQALCAFLISFFRG

SEQ ID NO: 1061 - protein, 70 aa, Homo sapiens
MRLASSLSVFPLLPLTCGHSLALLPSSIGQHSETFTRCRPLTFPVFRTINQVNPYKSPSLWYSVIATQTD

SEQ ID NO: 1062 - protein, 304 aa, Homo sapiens
TCPLLRNSSHAEPAHRQDGDLALTPCLGPGLGNPGRVRQKAGNRSSGGYSLRGQQHLGPLLLATAGAAGARERGQALHGVEMVAVRADVWHVRGRWRQLGHRPVARLHQLFAVVLFQQLLQGRSILFLLCDQAHQDPNGVLIGILSPVGRVDSTASTSRAGPDLLVRRAVVALPLEEVAHQDAQQPHEAEDRDDGDDRVLGGCLLWATCPGAVPRLPCLTTAAGPCCHLHATSGPPPPLITAMSTQRCPGTWLTWNAGNPPRPKPPRPAVSTECISSCHAHLGLQPPPKAATGMGLAWAGAPCS

SEQ ID NO: 1063 - protein, 52 aa, Homo sapiens
MGGCLLSLSLCFVPVVRLAASVARWAWLEPWVRQVAGGDRERLRGKWWHLLL

SEQ ID NO: 1064 - protein, 52 aa, Homo sapiens; identical to SEQ ID NO: 1063

SEQ ID NO: 1065 - protein, 58 aa, Homo sapiens
DLSGGEWNVTTRTRLWEIQPHLCFVMILKLDFSCRDFLSILPGVLTYSLPVKRFKKKN

SEQ ID NO: 1066 - protein, 21 aa, Homo sapiens
CFFQLSPEEVSWCPNVGSSFD

SEQ ID NO: 1067 - protein, 37 aa, Homo sapiens
  SITE (5): Xaa equals any of the naturally occurring L-amino acids
MGKLXLTLLLCLLQLLPPEVYYSRWGANMMAQTPLNP

SEQ ID NO: 1068 - protein, 62 aa, Homo sapiens
MGKLTLTLLLCLLQLLPPEVYYSRWGANMMAQTPLNSMRSPWPMEILLFFPLFSSSVFIGSA

SEQ ID NO: 1069 - protein, 63 aa, Homo sapiens
MSLDSLVLVKALFCFTFVVQITLSNISSTNVSILVFVHTAITSPLQTFQFWHYEEVAVNLKYL

SEQ ID NO: 1070 - protein, 63 aa, Homo sapiens; identical to SEQ ID NO: 1069

SEQ ID NO: 1071 - protein, 2 aa, Homo sapiens
LQ

SEQ ID NO: 1072 - protein, 2 aa, Homo sapiens
LQ

SEQ ID NO: 1073 - protein, 48 aa, Homo sapiens
  SITE (38): Xaa equals any of the naturally occurring L-amino acids
  SITE (42): Xaa equals any of the naturally occurring L-amino acids
  SITE (44): Xaa equals any of the naturally occurring L-amino acids
MGLRQQLELKLKLILLLCVFWFKSCTYILALLFLYSGXMWVXHXGRKI

SEQ ID NO: 1074 - protein, 261 aa, Homo sapiens
  SITE (90): Xaa equals any of the naturally occurring L-amino acids
  SITE (93): Xaa equals any of the naturally occurring L-amino acids
  SITE (169): Xaa equals any of the naturally occurring L-amino acids
  SITE (237): Xaa equals any of the naturally occurring L-amino acids
  SITE (239): Xaa equals any of the naturally occurring L-amino acids
  SITE (240): Xaa equals any of the naturally occurring L-amino acids
  SITE (253): Xaa equals any of the naturally occurring L-amino acids
TVADVRRPFAQVNVLAEEVLIYRIVLNDIVGDVVQDHQVRLRRKDDAVIRQLEATMLVGRKHRHGDVLVRETTVSDARPEDRVHFRHVCXPQXKRVSLLDVVIAAHRLIHTKGTHKANYCRRHTVTRVRVDVVRTEARFKQLGRGITFPDSPLTRTEHTDRFRPFFFQXGFEFLFHHIEGLIPGDWGKFAFFVIFTVFHTQQRLRQTVFTVHDFGQEIALNAVQATVNRCVRVALTXQXXVPAAFRPERRNQXRRTTQFAI

SEQ ID NO: 1075 - protein, 61 aa, Homo sapiens
FYTNVTYKSDATTLRFPGRCDFSSAWEVDLHQPFQCSAHPGAGITAPHLLGEKPGRPEEVG

SEQ ID NO: 1076 - protein, 54 aa, Homo sapiens [sequence omitted]

SEQ ID NO: 1077 - protein, 5 aa, Homo sapiens
QYLLI

SEQ ID NO: 1078 - protein, 30 aa, Homo sapiens
  SITE (2): Xaa equals any of the naturally occurring L-amino acids
  SITE (13): Xaa equals any of the naturally occurring L-amino acids
  SITE (16): Xaa equals any of the naturally occurring L-amino acids
MXASQYILFFLQXLGXKLQFQGISSQQQVE

SEQ ID NO: 1079 - protein, 30 aa, Homo sapiens
MRASQYILFFLQFLGFKLQFQGISSQQQVE

SEQ ID NO: 1080 - protein, 7 aa, Homo sapiens
MFGCPFC

SEQ ID NO: 1081 - protein, 261 aa, Homo sapiens; identical to SEQ ID NO: 595

SEQ ID NO: 1082 - protein, 11 aa, Homo sapiens
FLLSLHLAALQ

SEQ ID NO: 1083 - protein, 41 aa, Homo sapiens [sequence omitted]

SEQ ID NO: 1084 - protein, 141 aa, Homo sapiens
GGERHLHRTHPRLPGHRFLRLHRAPRVPHVCGVRAHGAGVPHLVSGGDEVSPGGAGPVSHSAEEQPVHQVDRLCGACPGQRVFLCPGEPGAKSGRHLSGGVPPYTECDHAQPLARPGAVESCNHEVCAQTGETVQPLMARR

SEQ ID NO: 1085 - protein, 45 aa, Homo sapiens
MSMKCYLVVLICIPLMATDAECLFLCLRAMRISLEKGLSRSFAYF

SEQ ID NO: 1086 - protein, 136 aa, Homo sapiens
  SITE (1): Xaa equals any of the naturally occurring L-amino acids
  SITE (3): Xaa equals any of the naturally occurring L-amino acids
  SITE (8): Xaa equals any of the naturally occurring L-amino acids
  SITE (14): Xaa equals any of the naturally occurring L-amino acids
XYXSCRKXYLTYGXNSRVDPRVRHVCGVRAHGAGVPHLVSGGDEVSPGGAGPVSHSAEEQPVHQVDRLCGACPGQRVFLCPGEPGAKSGRHLSGGVPPYTECDHAQPLARPGAVESCNHEVCAQTGETVQPLMARR

SEQ ID NO: 1087 - protein, 45 aa, Homo sapiens; identical to SEQ ID NO: 1085

SEQ ID NO: 1088 - protein, 177 aa, Homo sapiens
  SITE (90): Xaa equals any of the naturally occurring L-amino acids
  SITE (173): Xaa equals any of the naturally occurring L-amino acids
LDIKVLQVPTRLRSPAGFTQWIQHWGSRWSCLPVPRCAPALLSPWVVDGTGRCGAGGGAPWGGSGRTGAHGGWGEGQAWRAAGPEPCPAXRQLRPSEKSSTAAAGPGAKALTAWGRPAALSGAPPSPRPPGTHSGPQALRAAPVPARPSPSAPPRKLRELAPALASPERGSYXAAAG

SEQ ID NO: 1089 - protein, 414 aa, Homo sapiens
  SITE (174): Xaa equals any of the naturally occurring L-amino acids
  SITE (410): Xaa equals any of the naturally occurring L-amino acids
MERAVRVESGVLVGVVCLLLACPATATGPEVAQPEVDTTLGRVRGRQVGVKGTDRLVNVFLGIPFAQPPLGPDRFSAPHPAQPWEGVRDASTAPPMCLQDVESMNSSRFVLNGKQQIFSVSEDCLVLNVYSPAEVPAGSGRPVMVWVHGGALITGAATSYDGSALAAYGDVVVXTVQYRLGVLGFFSTGDEHAPGNQGFLDVVAALRWVQENIAPFGGDLNCVTVFGGSAGGSIISGLVLSPVAAGLFHRAITQSGVITTPGIIDSHPWPLAQKIANTLACSSSSPAEMVQCLQQKEGEELVLSKKLKNTIYPLTVDGTVFPKSPKELLKEKPFHSVPFLMGVNNHEFSWLIPRGWGLLDTMEQMSREDMLAISTPVLTSLDVPPEMMPTVIDEYLGSNSDAQAKCQAFXGIHG

SEQ ID NO: 1090 - protein, 571 aa, Homo sapiens
MERAVRVESGVLVGVVCLLLACPATATGPEVAQPEVDTTLGRVRGRQVGVKGTDRLVNVFLGIPFAQPPLGPDRFSAPHPAQPWEGVRDASTAPPMCLQDVESMNSSRFVLNGKQQIFSVSEDCLVLNVYSPAEVPAGSGRPVMVWVHGGALITGAATSYDGSALAAYGDVVVVTVQYRLGVLGFFSTGDEHAPGNQGFLDVVAALRWVQENIAPFGGDLNCVTVFGGSAGGSIISGLVLSPVAAGLFHRAITQSGVITTPGIIDSHPWPLAQKIANTLACSSSSPAEMVQCLQQKEGEELVLSKKLKNTIYPLTVDGTVFPKSPKELLKEKPFHSVPFLMGVNNHEFSWLIPRGWGLLDTMEQMSREDMLAISTPVLTSLDVPPEMMPTVIDEYLGSNSDAQAKCQAFQEFMGDVFINVPTVSFSRYLRDSGSPVFFYEFQHRPSSFAKIKPAWVKADHGAEGAFVFGGPFLMDESSRLAFPEATEEEKQLSLTMMAQWTHFARTGDPNSKALPPWPQFNQAEQYLEINPVPRAGQKFREAWMQFWSETLPSKIQQWHQKQKNRKAQEDL

SEQ ID NO: 1091 - protein, 68 aa, Homo sapiens
  SITE (68): Xaa equals any of the naturally occurring L-amino acids
MISSLLSKAVLSLWISVFSWNVLGCKKLKTIILQCFKEASDLVLRERYLGVVQALSDDFSFCFTILSX

SEQ ID NO: 1092 - protein, 56 aa, Homo sapiens
VSKLFDLVRVALWESTFLSLSLSVPSVCAMFRSSEESKISSEFKIIFVFLLFNVME

SEQ ID NO: 1093 - protein, 66 aa, Homo sapiens [sequence omitted]

SEQ ID NO: 1094 - protein, 21 aa, Homo sapiens
  SITE (15): Xaa equals any of the naturally occurring L-amino acids
RWRGASTPHRDYLSXRYCACG

SEQ ID NO: 1095 - protein, 11 aa, Homo sapiens
WQILLIALLLI

SEQ ID NO: 1096 - protein, 38 aa, Homo sapiens
MLRWRLLATALIALCRRSASSVASGEPPDSPPCPWRRR

SEQ ID NO: 1097 - protein, 76 aa, Homo sapiens
  SITE (62): Xaa equals any of the naturally occurring L-amino acids
  SITE (70): Xaa equals any of the naturally occurring L-amino acids
  SITE (71): Xaa equals any of the naturally occurring L-amino acids
  SITE (74): Xaa equals any of the naturally occurring L-amino acids
MLHMYSQKDPLILCVRLAVLLAVTLTVPVVLFPIRRALQQLLFPGKAFSWPRHVAIALILLXLVNVLASXXQPXGI

SEQ ID NO: 1098 - protein, 54 aa, Homo sapiens
  SITE (26): Xaa equals any of the naturally occurring L-amino acids
  SITE (27): Xaa equals any of the naturally occurring L-amino acids
  SITE (36): Xaa equals any of the naturally occurring L-amino acids
  SITE (40): Xaa equals any of the naturally occurring L-amino acids
  SITE (44): Xaa equals any of the naturally occurring L-amino acids
  SITE (47): Xaa equals any of the naturally occurring L-amino acids
  SITE (49): Xaa equals any of the naturally occurring L-amino acids
MLHMYSQKDPLILCVPPGRAARGDPXXASRAGPYPXGPAXAAFXRQXLXLGTTW

SEQ ID NO: 1099 - protein, 148 aa, Homo sapiens
  SITE (2): Xaa equals any of the naturally occurring L-amino acids
  SITE (17): Xaa equals any of the naturally occurring L-amino acids
LXMYSQKDPLILCVRLXVLLAVTLTVPVVLFPIRRALQQLLFPGKAFSWPRHVAIALILLVLVNVLVICVPTIRDIFGVIGSTSAPSLIFILPSIFYLRIVPSEVEPFLSWPKIQALCFGVLGVLFMAVSLGFMFANWATGQSRMSGH

SEQ ID NO: 1100 - protein, 149 aa, Homo sapiens
MLHMYSQKDPLILCVRLAVLLAVTLTVPVVLFPIRRALQQLLFPGKAFSWPRHVAIALILLVLVNVLVICVPTIRDIFGVIGSTSAPSLIFILPSIFYLRIVPSEVEPFLSWPKIQALCFGVLGVLFMAVSLGFMFANWATGQSRMSGH

SEQ ID NO: 1101 - protein, 40 aa, Homo sapiens
MILRGVYSMVPIYTHMIFLFTFFLTISGKYFKIFEKHSRI

SEQ ID NO: 1102 - protein, 40 aa, Homo sapiens; identical to SEQ ID NO: 1101

SEQ ID NO: 1103 - protein, 56 aa, Homo sapiens
MNLWLGALIPVTVHLKRMWSHPKFQAQKTFPLSKSPKYHPVFLLVIIMARSSQLKR

SEQ ID NO: 1104 - protein, 106 aa, Homo sapiens
QGFIFWTQYNIGYISLRSIGFQHKSLPIRKSKWRKHQIIIIITQQKCGDWQWFWGFISSIRASASHFMKLLPSERTLNTPRSYCSFFLNGILKNWLKREEHSKYIL

SEQ ID NO: 1105 - protein, 56 aa, Homo sapiens; identical to SEQ ID NO: 1103

SEQ ID NO: 1106 - protein, 116 aa, Homo sapiens
  SITE (14): Xaa equals any of the naturally occurring L-amino acids
  SITE (25): Xaa equals any of the naturally occurring L-amino acids
  SITE (33): Xaa equals any of the naturally occurring L-amino acids
VGFQGLEGNPPPAXLNGLEGKGKLXKKAQGTGXKIIFWPKESKTPSGSPKPAKAANSKSKESDEPHHSKNERPARPPPPIMTDGEDADYTHFTNQQSSTRHFSKSESSHKGFHYKH

SEQ ID NO: 1107 - protein, 4 aa, Homo sapiens
VLRN

SEQ ID NO: 1108 - protein, 4 aa, Homo sapiens
VLRN

SEQ ID NO: 1109 - protein, 54 aa, Homo sapiens [sequence omitted]

SEQ ID NO: 1110 - protein, 5 aa, Homo sapiens
TTMTG

SEQ ID NO: 1111 - protein, 40 aa, Homo sapiens
MPTTVGAQIFIFIFLLCTLFFLPFYGCLKSREKGRLVNDE

SEQ ID NO: 1112 - protein, 40 aa, Homo sapiens; identical to SEQ ID NO: 1111

SEQ ID NO: 1113 - protein, 101 aa, Homo sapiens [sequence omitted]

SEQ ID NO: 1114 - protein, 216 aa, Homo sapiens
  SITE (86): Xaa equals any of the naturally occurring L-amino acids
MKERKGFNLQGPLILWSFCLAIFSILGAVRMWGIMGTVLLTGGLKQTVCFINFIDNSTVKFWSWVFLLSKVIELGDTAFIILRKRXLIFIHWYHHSTVLVYTSFGYKNKVPAGGWFVTMNFGVHAIMYTYYTLKAANVKPPKMLPMLITSLQILQMFVGAIVSILTYIWRQDQGCHTTMEHLFWSFILYMTYFILFAHFFCQTYIRPKVKAKTKSQ

SEQ ID NO: 1115 - protein, 216 aa, Homo sapiens
MKERKGFNLQGPLILWSFCLAIFSILGAVRMWGIMGTVLLTGGLKQTVCFINFIDNSTVKFWSWVFLLSKVIELGDTAFIILRKRPLIFIHWYHHSTVLVYTSFGYKNKVPAGGWFVTMNFGVHAIMYTYYTLKAANVKPPKMLPMLITSLQILQMFVGAIVSILTYIWRQDQGCHTTMEHLFWSFILYMTYFILFAHFFCQTYIRPKVKAKTKSQ

SEQ ID NO: 1116 - protein, 16 aa, Homo sapiens
VLGLGVVLTPIIPVLW

SEQ ID NO: 1117 - protein, 55 aa, Homo sapiens
  SITE (30): Xaa equals any of the naturally occurring L-amino acids
NNLCFISPFTSMYWLAQFIVSEKQGTHLHXLQETVLPFNLKTRKLNFNRNLLSML

SEQ ID NO: 1118 - protein, 32 aa, Homo sapiens
MHMWILSLHFIFTPRLVLCEVRPNKIVEDTII

SEQ ID NO: 1119 - protein, 1 aa, Homo sapiens
A

SEQ ID NO: 1120 - protein, 51 aa, Homo sapiens
  SITE (20): Xaa equals any of the naturally occurring L-amino acids
  SITE (38): Xaa equals any of the naturally occurring L-amino acids
MELLQAKKLLLLLGLFVSCXSNIRKTEPCFGLDSITFXDPKKKCLSNLKSC

SEQ ID NO: 1121 - protein, 51 aa, Homo sapiens
MELLQAKKLLLLLGLFVSCCSNIRKTEPCFGLDSITFRDPKKKCLCNLKSC

SEQ ID NO: 1122 - protein, 2 aa, Homo sapiens
YF

SEQ ID NO: 1123 - protein, 88 aa, Homo sapiens
LTTPYGGLCKQSTRGSIISTWQCTWWLCDLEKVSYSCLCVLTLETETLFVVFTLFQQQKLFQGKSYRTFKHVCIHTYPIPHYIKVILL

SEQ ID NO: 1124 - protein, 82 aa, Homo sapiens
MNLGWYQMHPLKMIWLTIFLTWLMRQASPTGHDLEVKVFCCYCGLKYLVMGEECRVVALAQTQENPFSPLFYFCYSDHLSPF

SEQ ID NO: 1125 - protein, 82 aa, Homo sapiens; identical to SEQ ID NO: 1124

SEQ ID NO: 1126 - protein, 84 aa, Homo sapiens
  SITE (17): Xaa equals any of the naturally occurring L-amino acids
MGTFSLMLLLLPSVVCXSFKVRPLFCRAAVVCSGSTSDPIHLGPSHTWRCHQWRLQNSKDGCLLLPPGSPSQRETDLMLAGMLL

SEQ ID NO: 1127 - protein, 25 aa, Homo sapiens
GLFALSFLFLLVVMLGCQFDIFLAF

SEQ ID NO: 1128 - protein, 84 aa, Homo sapiens
MGTFSLMLLLLPSVVCFSFKVRPLFCRAAVVCSGSTSDPIHLGPSHTWRCHQWRLQNSKDGCLLLPPGSPSQRETDLMLAGMLL

SEQ ID NO: 1129 - protein, 219 aa, Homo sapiens [sequence omitted]

SEQ ID NO: 1130 - protein, 219 aa, Homo sapiens
  SITE (104): Xaa equals any of the naturally occurring L-amino acids
  SITE (197): Xaa equals any of the naturally occurring L-amino acids
MEMASKMKDTGFIVFAVLLLVSCLILIFVIAPRYGQRNILIYIIICSVIGAFSVAAVKGLGITIKNFFQGLPVVRHPLPYILSLILALSLSTQVNFLNRALDIXNTSLVFPIYYVFFTTVVVTSSIILFKEWYSMSAVDIAGTLSGFVTIILGVFMLHAFKDLDISCASLPHMHKNPPPSPAPEPTVIRLEDKNVLXDNIELASTSSPEEKPKVFIIHS

SEQ ID NO: 1131 - protein, 217 aa, Homo sapiens
MASKMKDTGFIVFAVLLLVSCLILIFVIAPRYGQRNILIYIIICSVIGAFSVAAVKGLGITIKNFFQGLPVVRHPLPYILSLILALSLSTQVNFLNRALDIFNTSLVFPIYYVFFTTVVVTSSIILFKEWYSMSAVDIAGTLSGFVTIILGVFMLHAFKDLDISCASLPHMHKNPPPSPAPEPTVIRLEDKNVLVDNIELASTSSPEEKPKVFIIHS

SEQ ID NO: 1132 - protein, 253 aa, Homo sapiens
  SITE (215): Xaa equals any of the naturally occurring L-amino acids
  SITE (252): Xaa equals any of the naturally occurring L-amino acids
  SITE (253): Xaa equals any of the naturally occurring L-amino acids
MQACVLLLGLVLSAQLQSPENMRMGGGRVLLRAHPVPAGGGQCQSSAKGPWVGTGPEREERDSPEGRWASYWAQSWEGVAASTGWAWTPLAPTPSGCGCSLSLESRTGPGCLGGCQVPPELPRAPTCKCQPQGSAQMRPSQLQPAMPWDAHREGGGFGLLSPWERLGAVTARLAQAHCRVGWLPQPGLGGTPGSGPPCLESQWGDGEETWPPMAXGQLRTRTCWSWKCCGVEGWGGQLLTPASCLLLSTFPXX

SEQ ID NO: 1133 - protein, 102 aa, Homo sapiens
NSEKGQKKQRGPRWICQLFCRCFLPLLWVVCSPLQTSARREGLNLPAPQDLLPSGPSPALRSLPDRRVDRATWAARETHGGPPCGQPCQLPPSPELHLHLEE

SEQ ID NO: 1134 - protein, 137 aa, Homo sapiens
MQACVLLLGLVLSAQLQSPENMRMGGGRVLLRAHPVPAGGGQCQSSAKGPWVGTGPEREERDSPEGRWASYWAQSWEGVAASTGWAWTPLAPTPSGCGCSPKPGEQDRPGVSGRLPGASQSSQGPPPASASLRAVPK

SEQ ID NO: 1135 - protein, 93 aa, Homo sapiens
  SITE (34): Xaa equals any of the naturally occurring L-amino acids
  SITE (76): Xaa equals any of the naturally occurring L-amino acids
MYALYITVHGYFLITFLFGMVVLALVVWKIFTLXRATAVKERGKNRKKVLTLLGLSSLVGVTWGLAIFTPLGLSTXYIFALFNSLQAQRGITV

SEQ ID NO: 1136 - protein, 93 aa, Homo sapiens
MYALYITVHGYFLITFLFGMVVLALVVWKIFTLSRATAVKERGKNRKKVLTLLGLSSLVGVTWGLAIFTPLGLSTVYIFALFNSLQAQRGITV

SEQ ID NO: 1137 - protein, 122 aa, Homo sapiens [sequence omitted]

SEQ ID NO: 1138 - protein, 241 aa, Homo sapiens
APGQTPSLCSWLLPLPSTWATTGHVCFSDILQTPDGGQLLLDWAKQPDSSQDPDPTTQPIVLLLPGITGSSQETYVLHLVNQALRDGYQAVVFNNRGCRGEELRTHRAFCASNTEDLETVVNHIKHRYPQAPLLAVGISFGGILVLNHLAQARQAAGLVAALTLSACWDSFETTRSLETPLNSLLFNQPLTAGLCQLVERLSYGKTCRPVQSASLMSATHLWPLDIKTVLPTTKQQALEPR

SEQ ID NO: 1139 - protein, 242 aa, Homo sapiens
MAPGQTPSLCSWLLPLPSTWATTGHVCFSDILQTPDGGQLLLDWAKQPDSSQDPDPTTQPIVLLLPGITGSSQETYVLHLVNQALRDGYQAVVFNNRGCRGEELRTHRAFCASNTEDLETVVNHIKHRYPQAPLLAVGISFGGILVLNHLAQARQAAGLVAALTLSACWDSFETTRSLETPLNSLLFNQPLTAGLCQLVERLSYGKTCRPVQSASLMSATHLWPLDIKTVLPTTKQQALEPR

SEQ ID NO: 1140 - protein, 180 aa, Homo sapiens
  SITE (143): Xaa equals any of the naturally occurring L-amino acids
MGWPRPGRALVAVKALLVLSLLQVPAQAVVRAVLEDNSSSVDFADLPALFGVPLAPEGIRGYLMEVKPANACHPIEAPRLGNRSLGAIVLIRRYDCTFDLKVLNAQRAGFEAAIVHNVHSDDLVSMTHVYEDLRGQIAIPSVXVSEAARRTCGSSWAATSRPTRCPADDPPCHDLAVTPC

SEQ ID NO: 1141 - protein, 225 aa, Homo sapiens
  SITE (21): Xaa equals any of the naturally occurring L-amino acids
  SITE (45): Xaa equals any of the naturally occurring L-amino acids
TQPCQRPGIVTPVLTVSWVLXCTLALVVSAFFVLNHLWLWAQACXSHRRPVKTSTCQKAQVRTFTWHNDLCAICLDEYEEGDQLKILPCSHTYHCKCIDPWFSQAPRRSCPVCKQSVAATEDSFDSTTYSFRDEDPSLPGHRPPIWAIQVQYAPGGWSCWAAPVPTATAAPRPWRQSIPLSPQPLLRPLVSKDLGQGGGCNEECFWSEKNKVGLKAEKKKKKKTR

SEQ ID NO: 1142 - protein, 359 aa, Homo sapiens [sequence omitted]

SEQ ID NO: 1143 - protein, 133 aa, Homo sapiens
MWHTKPLGSGSCVPLLPLLLLLLLLFPLLPWPPPLPPPPPSSLHPFAPAFPATGSLSSNNSQLLAPLRLQNALHLFKCFPVLFPLHKIISFHPEYPWQAPIFQYFYLSIPSSSLHPEHLGHSFVSTLHSPTRQ

SEQ ID NO: 1144 - protein, 86 aa, Homo sapiens
  SITE (72): Xaa equals any of the naturally occurring L-amino acids
PCCFHKPHASHIMNFLIRIQCIYLPKIVCAYSKYEQFLNNGSIIFVQNAKNWGQAWWHTPVIPALWEAKVGXSPEVRSLRPAWPAW

SEQ ID NO: 1145 - protein, 133 aa, Homo sapiens; identical to SEQ ID NO: 1143

SEQ ID NO: 1146 - protein, 99 aa, Homo sapiens
  SITE (91): Xaa equals any of the naturally occurring L-amino acids
MAALLLLPLLLLLPLLLLKLHLWPQLRWLPADLAFAVRALCCKRALRARALAAAAADPEGPEGGCSLAWRLAELAQQRAELLLRSRALATXRRSARVTG

SEQ ID NO: 1147 - protein, 455 aa, Homo sapiens
MAALLLLPLLLLLPLLLLKLHLWPQLRWLPADLAFAVRALCCKRALRARALAAAAADPEGPEGPCILAWRLAELAQQRARNFLLRSRALATQRRSARVTGLTRLPTCARLGLGTRRRRQRRGERWRRRAGSAGSRRCSGRKRRGVCRRGRCRQRWRSRAPLSPGATVALLLPAGPEFLWLWIGLAKAGLRTAFVPTALRRGPLLHCLRSCGARALVLAPEFLESLEPDLPALRAMGLHLWAAGPGTHPAGISDLLAEVSAEVDGPVPGYLSSPQSITDTCLYIFTSGTTGLPKAARISHLKILQCQGFYQLCGVHQEDVIYLALPLYHMSGSLLGIVGCMGIGATVVLKSKFSAGQFWEDCQQHRVTVFQYIGELCRYLVNQPPSKAERGHKVRLAVGSGLRPDTWERFVRRFGPLQVLETYGLTEGNVPPSTTQDSGALWGVLPGFTSISSPSP

SEQ ID NO: 1148 - protein, 153 aa, Homo sapiens
  SITE (77): Xaa equals any of the naturally occurring L-amino acids
  SITE (82): Xaa equals any of the naturally occurring L-amino acids
  SITE (83): Xaa equals any of the naturally occurring L-amino acids
  SITE (86): Xaa equals any of the naturally occurring L-amino acids
  SITE (91): Xaa equals any of the naturally occurring L-amino acids
  SITE (122): Xaa equals any of the naturally occurring L-amino acids
  SITE (124): Xaa equals any of the naturally occurring L-amino acids
MMLIPMASVMAVTEPKWVSVWSRFLWVTLLSMVLGSLLALLLPLGAVEEQCLAVLKGLYLLRSKPDRAQHAAPSAPXRPRSXXSPXGARRXLVAKTKAFSSGVKFGKAQELALEPRPWKIKXAXGQSRGKKAQKSSFNAPPFKEWDPGNFPGD

SEQ ID NO: 1149 - protein, 361 aa, Homo sapiens
  SITE (2): Xaa equals any of the naturally occurring L-amino acids
  SITE (4): Xaa equals any of the naturally occurring L-amino acids
  SITE (19): Xaa equals any of the naturally occurring L-amino acids
AXPXGKLEARAALNQALEXKRQGKREKAQKLFMHALKMDPDFVDALTEFGIFSEEDKDIIQADYLYTRALTISPYHEKALVNRDRTLPLVEEIDQRYFSIIDSKVKKVMSIPKGNSALRRVMEETYYHHIYHTVAIEGNTLTLSEIRHILETRYAVPGKSLEEQNEVIGMHAAMKYINTTLVSRIGSVTISDVLEIHRRVLGYVDPVEAGRFRTTQVLVGHHIPPHPQDVEKQMQEFVQWLNSEEAMNLHPVEFAALAHYKLVYIHPFIDGNGRTSRLLMNLILMQAGYPPITIRKEQRSDYYHVLEAANEGDVRPFIRFIAKCTETTLDTLLFATTEYSVALPEAQPNHSGFKETLPVKP

SEQ ID NO: 1150 - protein, 458 aa, Homo sapiens
MMLIPMASVMAVTEPKWVSVWSRFLWVTLLSMVLGSLLALLLPLGAVEEQCLAVLKGLYLLRSKPDRAQHAATKCTSPSTELSITSRGATLLVAKTKASPAGKLEARAALNQALEMKRQGKREKAQKLFMHALKMDPDFVDALTEFGIFSEEDKDIIQADYLYTRALTISPYHEKALVNRDRTLPLVEEIDQRYFSIIDSKVKKVMSIPKGNSALRRVMEETYYHHIYHTVAIEGNTLTLSEIRHILETRYAVPGKSLEEQNEVIGMHAAMKYINTTLVSRIGSVTISDVLEIHRRVLGYVDPVEAGRFRTTQVLVGHHIPPHPQDVEKQMQEFVQWLNSEEAMNLHPVEFAALAHYKLVYIHPFIDGNGRTSRLLMNLILMQAGYPPITIRKEQRSDYYHVLEAANEGDVRPFIRFIAKCTETTLDTLLFATTEYSVALPEAQPNHSGFKETLPVKP

SEQ ID NO: 1151 - protein, 125 aa, Homo sapiens
  SITE (46): Xaa equals any of the naturally occurring L-amino acids
AQRNPGAVPAVWRQAGVTFTSAKGRSSPYWSLHPQIILLRKLSSSXQKPRSSSAQCGRNAAAGLPHCLRASWSRLLKIEWQVGLAWAGADVLCGHPVPKRPPTLGPQTSGADWHLRGHSPTHLLQ

SEQ ID NO: 1152 - protein, 17 aa, Homo sapiens
MLSGSLGSAVCMSSQPR

SEQ ID NO: 1153 - protein, 17 aa, Homo sapiens
MLSGSLGSAVCMSSQPR

SEQ ID NO: 1154 - protein, 254 aa, Homo sapiens
  SITE (218): Xaa equals any of the naturally occurring L-amino acids
  SITE (228): Xaa equals any of the naturally occurring L-amino acids
  SITE (240): Xaa equals any of the naturally occurring L-amino acids
ETRLHHVSTLAAFTVRQVQQHQGNLDASGPARDLVDAFLLKMAQEEQNPGTEFTNKNMLMTVIYLLFAGTMTVSTTVGYTLLLLMKYPHVQKWVREELNRELGAGQAPSLGDRTRSLTPTRFCMRRSGCWRWCPWEYPAPSCGPPASEGTPCPRARRSSPSLAPSCMTPTSSSTQKSSTQTVSWMQMDGSGSMRRSCLLLKEACLPWKGPGKSGALPXLHHHPTSLLXGEPVPAGHPEPXAHRQWPFQHSPSLP

SEQ ID NO: 1155 - protein, 302 aa, Homo sapiens
MEATGTWALLLALALLLLLTLALSGTRARGHLPPGPTPLPLLGNLLQLRPGALYSGLMRLSKKYGPVFTIYLGPWRPVVVLVGQEAVREALGGQAEEFSGRGTVAMLEGTFDGHGVFFSNGERWRQLRKFTMLALRDLGMGKREGEELIQAEARCLVETFQGTEGRPFDPSLLLAQATSNVVCSLLFGLRFSYEDKEFQAVVRAAGGTLLGVSSQGGQVSGWDPSPTTFPEGSCQGPMRTSCPSPHRPTRCSPGSCGPCQAPTSSSSTTSAPWLPSQSGRCSSTRGTWMLRAPHVTLSMPSC

SEQ ID NO: 1156 - protein, 302 aa, Homo sapiens; identical to SEQ ID NO: 1155

SEQ ID NO: 1157 - protein, 240 aa, Homo sapiens
MTAPVPAPRILLPLLLLLLLTPPPGARGEVCMASRGLSLFPESCPDFCCGTCDDQYCCSDVLKKFVWSEERCAVPEASVPASVEPVEQLGSALRFRPGYNDPMSGFGATLAVGLTIFVLSVVTIIICFTCSCCCLYKTCRRPRPVVTTTTSTTVVHAPYPQPPSVPPSYPGPSYQGYHTMPPQPGMPAAPYPMQYPPPYPAQPMGPPAYHETLAGGAAAPYPASQPPYNPAYMDAPKAAL

SEQ ID NO: 1158 - protein, 240 aa, Homo sapiens; identical to SEQ ID NO: 1157

SEQ ID NO: 1159 - protein, 116 aa, Homo sapiens
MKGLRSLAATTLALFLVFVFLGNSSCAPQRLLERRNWTPQAMLYLKGAQGRRFISDQSRRKDLSDRPLPERRSPNPQLLTIPEAATILLASLQKSPEDEEKNFDQTRFLEDSLLNW

SEQ ID NO: 1160 - protein, 116 aa, Homo sapiens; identical to SEQ ID NO: 1159

SEQ ID NO: 1161 - protein, 426 aa, Homo sapiens
VVPFSGMLPPGAEKAVASFVTQLAAAEALQKAPDVTTLPRNVMFVFFQGETFDYIGSSRMVYDMEKGKFPVQLENVDSFVELGQVALRTSLELWMHTDPVSQKNESVRNQVEDLLATLEKSGAGVPAVILRRPNQSQPLPPSSLQRFLRARNISGVVLADHSGAFHNKYYQSIYDTAENINVSYPEWLSPEEDLNFVTDTAKALADVATVLGRALYELAGGTNFSDTVQADPQTVTRLLYGFLIKANNSWFQSILRQDLRSYLGDGPLQHYIAVSSPTNTTYVVQYALANLTGTVVNLTREQCQDPSKVPSENKDLYEYSWVQGPLHSNETDRLPRCVRSTARLARALSPAFELSQWSSTEYSTWTESRWKDIRARIFLIASKELELITLTVGFGILIFSLIVTYCINAKADVLFIAPREPGAVSY

SEQ ID NO: 1162 - protein, 417 aa, Homo sapiens
MATAGGGSGADPGSRGLLRLLSFCVLLAGLCRGNSVERKIYIPLNKTAPCVRLLNATHQIGCQSSISGDTGVIHVVEKEEDLQWVLTDGPNPPYMVLLESKHFTRDLMEKLKGRTSRIAGLAVSLTKPSPASGFSPSVQCPNDGFGVYSNSYGPEFAHCREIQWNSLGNGLAYEDFSFPIFLLEDENETKVIKQCYQDHNLSQNGSAPTFPLCAMQLFSHMHAVISTATCMRRSSIQSTFSINPEIVCDPLSDYNVWSMLKPINTTGTLKPDDRVVVAATRLDSRSFFWNVAPGAESAVASFVTQLAAAEALQKAPDVTTLPRNVMFVFFQGETFDYIGSSRMVYDMEKGKFPVQLENVDSFVELGQVALRTSLELWMHTDPVSQKNESVRNQVEDLLATLETVSYAHLNLQGGEVL

SEQ ID NO: 1163 - protein, 709 aa, Homo sapiens
  SITE (216): Xaa equals any of the naturally occurring L-amino acids
MATAGGGSGADPGSRGLLRLLSFCVLLAGLCRGNSVERKIYIPLNKTAPCVRLLNATHQIGCQSSISGDTGVIHVVEKEEDLQWVLTDGPNPPYMVLLESKHFTRDLMEKLKGRTSRIAGLAVSLTKPSPASGFSPSVQCPNDGFGVYSNSYGPEFAHCREIQWNSLGNGLAYEDFSFPIFLLEDENETKVIKQCYQDHNLSQNGSAPSFPLCAMXLFSHMHAVISTATCMRRSSIQSTFSINPEIVCDPLSDYNVWSMLKPINTTGTLKPDDRVVVAATRLDSRSFFWNVAPGAESAVASFVTQLAAAEALQKAPDVTTLPRNVMFVFFQGETFDYIGSSRMVYDMEKGKFPVQLENVDSFVELGQVALRTSLELWMHTDPVSQKNESVRNQVEDLLATLEKSGAGVPAVILRRPNQSQPLPPSSLQRFLRARNISGVVLADHSGAFHNKYYQSIYDTAENINVSYPEWLSPEEDLNFVTDTAKALADVATVLGRALYELAGGTNFSDTVQADPQTVTRLLYGFLIKANNSWFQSILRQDLRSYLGDGPLQHYIAVSSPTNTTYVVQYALANLTGTVVNLTREQCQDPSKVPSENKDLYEYSWVQGPLHSNETDRLPRCVRSTARLARALSPAFELSQWSSTEYSTWTESRWKDIRARIFLIASKELELITLTVGFGILIFSLIVTYCINAKADVLFIAPREPGAVSY

SEQ ID NO: 1164 - protein, 230 aa, Homo sapiens
MTGLYELVWRVLHALLCLHRTLTSWLRVRFGTWNWIWRRCCRAASAAVLAPLGFTLRKPPAVGRNRRHHRHPRGGSCLAAAHHRMRWRADGRSLEKLPVHMGLVITEVEQEPSFSDIASLVVWCMAVGISYISVYDHQGIFKRNNSRLMDEILKQQQELLGLDCSKYSPEFANSNDKDDQVLNCHLAVKVLSAGRWKSRYCKSCSGLLPVSSPEAKETHRFGCRYVSQFT

SEQ ID NO: 1165 - protein, 293 aa, Homo sapiens
MTGLYELVWRVLHALLCLHRTLTSWLRVRFGTWNWIWRRCCRAASAAVLAPLGFTLRKPPAVGRNRRHHRHPRGGSCLAAAHHRMRWRADGRSLEKLPVHMGLVITEVEQEPSFSDIASLVVWCMAVGISYISVYDHQGIFKRNNSRLMDEILKQQQELLGLDCSKYSPEFANSNDKDDQVLNCHLAVKVLSPEDGKADIVRAAQDFCQLVAQKQKRPTDLDVDTLASLLSSNGCPDPDLVLKFGPVDSTLGFLPWHIRLTEIVSLPSHLNISYEDFFSALRQYAACEQRLGK

SEQ ID NO: 1166 - protein, 173 aa, Homo sapiens
  SITE (85): Xaa equals any of the naturally occurring L-amino acids
  SITE (128): Xaa equals any of the naturally occurring L-amino acids
  SITE (146): Xaa equals any of the naturally occurring L-amino acids
  SITE (160): Xaa equals any of the naturally occurring L-amino acids
  SITE (168): Xaa equals any of the naturally occurring L-amino acids
  SITE (172): Xaa equals any of the naturally occurring L-amino acids
MVEEPGRFLPLWLHILLITVLLVLSGIFSGLNLGLMALDPMELRIVQNCGTEKERRYARKIEPIRRKGNYLLCSLLLGNVLVNTXLTILLDNLIGSGLMAVASSTIGIVIFGEILPQALCSRHGLAVXANTILLTKFFMLLTFPLXFPISKLLDFFLGQXIRTVYNRXKLMXM

SEQ ID NO: 1167 - protein, 173 aa, Homo sapiens
  SITE (146): Xaa equals any of the naturally occurring L-amino acids
  SITE (160): Xaa equals any of the naturally occurring L-amino acids
  SITE (168): Xaa equals any of the naturally occurring L-amino acids
  SITE (172): Xaa equals any of the naturally occurring L-amino acids
MVEEPGRFLPLWLHILLITVLLVLSGIFSGLNLGLMALDPMELRIVQNCGTEKERRYARKIEPIRRKGNYLLCSLLLGNVLVNTSLTILLDNLIGSGLMAVASSTIGIVIFGEILPQALCSRHGLAVGANTILLTKFFMLLTFPLXFPISKLLDFFLGQXIRTVYNRXKLMXM

SEQ ID NO: 1168 - protein, 314 aa, Homo sapiens
  SITE (93): Xaa equals any of the naturally occurring L-amino acids
EKAAGAGKSHLAIVQKVNNEGEGDPFYEVLGLVTLEDVIEEIIKSEILDESDMYTDNRSRKRVSEKNKRDFSAFKDADNELKVKISPQLLLAXHRFLATEVSQFSPSLISEKILLRLLKYPDVIQELKFDEHNKYYARHYLYTRNKPADYFILILQGKVEVEAGKENMKFETGAFSYYGTMALTSVPSDRSPAHPTPLSRSASLSYPDRTDVSTAATLAGSSNQFGSSVLGQYISDFSVRALVDLQYIKITRQQYQNGLLASRMENSPQFPIDGCTTHMENLAEKSELPVVDETTTLLNERNSLLHKASHENAI

SEQ ID NO: 1169 - protein, 604 aa, Homo sapiens
MVEEPGRFLPLWLHILLITVLLVLSGIFSGLNLGLMALDPMELRIVQNCGTEKERRYARKIEPIRRKGNYLLCSLLLGNVLVNTSLTILLDNLIGSGLMAVASSTIGIVIFGEILPQALCSRHGLAVGANTILLTKFFMLLTFPLSFPISKLLDFFLGQEIRTVYNREKLMEMLKVTEPYNDLVKEELNMIQGALELRTKTVEDIMTQLQDCFMIRSDAILDFNTMSEIMESGYTRIPVFEDEQSNIVDILYVKDLAFVDPDDCTPLKTITRFYNHPVHFVFHDTKLDAMLEEFKKGKSHLAIVQKVNNEGEGDPFYEVLGLVTLEDVIEEIIKSEILDESDMYTDNRSRKRVSEKNKRDFSAFKDADNELKVKISPQLLLAAHRFLATEVSQFSPSLISEKILLRLLKYPDVIQELKFDEHNKYYARHYLYTRNKPADYFILILQGKVEVEAGKENMKFETGAFSYYGTMALTSVPSDRSPAHPTPLSRSASLSYPDRTDVSTAATLAGSSNQFGSSVLGQYISDFSVRALVDLQYIKITRQQYQNGLLASRMENSPQFPIDGCTTHMENLAEKSELPVVDETTTLLNERNSLLHKASHENAI

SEQ ID NO: 1170 - protein, 189 aa, Homo sapiens
  SITE (169): Xaa equals any of the naturally occurring L-amino acids
  SITE (172): Xaa equals any of the naturally occurring L-amino acids
  SITE (180): Xaa equals any of the naturally occurring L-amino acids
MAAASAGATRLLLLLLMAVAAPSRARGSGCRAGTGARGAGAEGREGEACGTVGLLLEHSFEIDDSANFRKRGSLLWNQQDGTLSLSQRQLSEEERGRLRDVAALNGLYRVRIPRRPGALDGLEAGGYVSSFVPACSLVESHLSDQLTLHVDVAGNVVGVSVVTHPMAPXSPXGFPLPWSXAEILATIQF

SEQ ID NO: 1171 - protein, 117 aa, Homo sapiens
AASAGATRLLLLLLMAVAAPSRARGSGCRAGTGARGAGAEGREGEACGTVGLLLEHSFEILATMPVLTSHPPTPSPCSLGTCRLLSSLCAFVPGGLTLLSLAGLGGPVQAPAAPPSL

SEQ ID NO: 1172 - protein, 241 aa, Homo sapiens
MAAASAGATRLLLLLLMAVAAPSRARGSGCRAGTGARGAGAEGREGEACGTVGLLLEHSFEIDDSANFRKRGSLLWNQQDGTLSLSQRQLSEEERGRLRDVAALNGLYRVRIPRRPGALDGLEAGGYVSSFVPACSLVESHLSDQLTLHVDVAGNVVGVSVVTHPMAPCSPRGFPPAHGVEPEILATMPVLTSHPPTPSPCSLGTCRLLSSLCAFVPGGLTLLSLAGLGGPVQAPAAPPSL

SEQ ID NO: 1173 - protein, 265 aa, Homo sapiens
  SITE (215): Xaa equals any of the naturally occurring L-amino acids
MFLLFLLTCELAAEVAAEVEKSSDGPGAAQEPTWLTDVPAAMEFIAATEVAVIGFFQDLEIPAVPILHSMVQKFPGVSFGISTDSEVLTHYNITGNTICLFRLVDNEQLNLEDEDIESIDATKLSRFIEINSLHMVTEYNPVTVIGLFNSVIQIHLLLIMNKASPEYEENMHRYQKAAKLFQGKILFILVDSGMKENGKVISFFKLKESQLPALXIYQTLDDEWDTLPTAEVSVEHVQNFCDGFLSGKLLKENRESEGKTPKVEL

SEQ ID NO: 1174 - protein, 265 aa, Homo sapiens
MFLLFLLTCELAAEVAAEVEKSSDGPGAAQEPTWLTDVPAAMEFIAATEVAVIGFFQDLEIPAVPILHSMVQKFPGVSFGISTDSEVLTHYNITGNTICLFRLVDNEQLNLEDEDIESIDATKLSRFIEINSLHMVTEYNPVTVIGLFNSVIQIHLLLIMNKASPEYEENMHRYQKAAKLFQGKILFILVDSGMKENGKVISFFKLKESQLPALAIYQTLDDEWDTLPTAEVSVEHVQNFCDGFLSGKLLKENRESEGKTPKVEL

SEQ ID NO: 1175 - protein, 158 aa, Homo sapiens [sequence omitted]

SEQ ID NO: 1176 - protein, 291 aa, Homo sapiens
MSQEGVELEKSVRRLREKFHGKVSSKKAGALMRKFGSDHTGVGRSIVYGVKQKDGQELSNDLDAQDPPEDMKQDRDIQAVATSLLPLTEANLRMFQRAQDDLIPAVDRQFACSSCDHVWWRRVPQRKEVSRCRKCRKRYEPVPADKMWGLAEFHCPKCRHNFRGWAQMGSPSPCYGCGFPVYPTRILPPRWDRDPDRRSTHTHSCSAADCYNRREPHVPGTSCAHPKSRKQNHLPKVLHPSNPHISSGSTVATCLSQGGLLEDLDNLILEDLKEEEEEEEEVEDEEGGPRE

SEQ ID NO: 1177 - protein, 125 aa, Homo sapiens [sequence omitted]

SEQ ID NO: 1178 - protein, 6 aa, Homo sapiens
  SITE (4): Xaa equals any of the naturally occurring L-amino acids
GTQXAL

SEQ ID NO: 1179 - protein, 125 aa, Homo sapiens [sequence omitted]

SEQ ID NO: 1180 - protein, 132 aa, Homo sapiens
  SITE (104): Xaa equals any of the naturally occurring L-amino acids
  SITE (120): Xaa equals any of the naturally occurring L-amino acids
MPDVQGPWHPAHPPIPSAALCLLWPHCLAAPKYARPRCLLVFVLCDRSAWNILLYSVGSKVSGLCSNCSLVPGVVAHTCNPKVPLGLQGCELPCPAEHLIFSKXLSSCATWAHCFLGLSXCWCLHPHPHPSW

SEQ ID NO: 1181 - protein, 92 aa, Homo sapiens
SGLAWALLLSLPGGLRSSSARLPPEPFHGQGLSSVGAIRRRVCRSVRLGDPWGMEGTTRPFPSVPCQAVLTAASSQGRKPGQRQRLLVPSIP

SEQ ID NO: 1182 - protein, 139 aa, Homo sapiens
TFRLVSAHLKTRKLINPEAAERRWRDWDSRQGWLSVKMQRVSGLLSWTLSRVLWLSGLSEPGAARQPRIMEEKALEVYDLIRTIRDPEKPNTLEELEVVSESCVEVQEINEEEYLVIIRFTPTVPHCSLATLIVGNLHF

SEQ ID NO: 1183 - protein, 143 aa, Homo sapiens
MPDVQGPWHPAHPPIPSAALCLLWPHCLAAPKYARPRCLLVFVLCDRSAWNILLYSVGSKVSGLCSNCSLVPGVVAHTCNPKVPLGLQGCELPCPAEHLIFSKCLSSCATWAHCFLGLSCCWCLHPHPHPSWPAPFLSRWAHV

SEQ ID NO: 1184 - protein, 13 aa, Homo sapiens
MGQGACKNMSVGS

SEQ ID NO: 1185 - protein, 102 aa, Homo sapiens; identical to SEQ ID NO: 1133

SEQ ID NO: 1186 - protein, 259 aa, Homo sapiens
  SITE (62): Xaa equals any of the naturally occurring L-amino acids
AGAWVSLGPCLFPAPADSEQRPWVRRVGVGPLPAEPGQGELQESPLCPCSWNVPQRPHLKGXCAGGVAQSHTASTLSSGTGDSGCSGKGLLDVTYNSVRLETDAGGGRAGPPGITDHRKMGGGSRGPAPTPSCLTLLSCPHPCAFVPETRVATQAGPGSSLILPLPSEPCSSLPSPLPPLPRRVTSDRAPLAIQGGSRGLDRRARRLPAVAGASCPCRVGELSGREPYLPSAKTVKVYRLFTDFYLNCKSADFVNVLGV

SEQ ID NO: 1187 - protein, 119 aa, Homo sapiens
MGQGACQKYVCWFLNVVCPCPPGSGRVHVSPHTCAREGASWRGDSRARGLHLWLPLASLGGPGLPGSQALSCGTWHLADQLAGRKIGGHRAGGQCPLPVSIRSTCHCMQPVGTFLAVRN

SEQ ID NO: 1188 - protein, 177 aa, Homo sapiens
MRGSVECTWGWGHCAPSPLLLWTLLLFAAPFGLLGEKTRQVSLEVIPNWLGPLQNLLHIRAVGTNSTLHYVWSSLGPLAVVMVATNTPHSTLSVNWSLLLSPEPDGGLMVLPKDSIQFSSALVFTRLLEFDSTNVSDTAAKPLGRPYPPYSLADFSWNNITDSLDPATLSATFQGTP

SEQ ID NO: 1189 - protein, 330 aa, Homo sapiens
RPTRPLNCGRMRGSVECTWGWGHCAPSPLLLWTLLLFAAPFGLLGEKTRQLLEFDSTNVSDTAAKPLGRPYPPYSLADFSWNNITDSLDPATLSATFQGHPMNDPTRTFANGSLAFRVQAFSRSSRPAQPPRLLHTADTCQLEVALIGASPRGNRSLFGLEVATLGQGPDCPSMQEQHSIDDEYAPAVFQLDQLLWGSLPSGFAQWRPVAYSQKPGGRESALPCQASPLHPALAYSLPQSPIVRAFFGSQNNFCAFNLTFGASTGPGYWDQHYLSWSMLLGVGFPPVDGLSPLVLGIMAVALGAPGLMLLGGGLVLLLHHKKYSEYQSIN

SEQ ID NO: 1190 - protein, 95 aa, Homo sapiens
MAASRWARKAVVLLCASDLLLLLLLLPPPGSCAAEARPGRPTSLPHLPGRRRRIFAITMMQTWRVFWSNGRKMMTLKKEIFQSTRDLQHLSTSQR

SEQ ID NO: 1191 - protein, 234 aa, Homo sapiens
MAASRWARKAVVLLCASDLLLLLLLLPPPGSCAAEGSPGTPDESTPPPRKKKKDIRDYNDADMARLLEQWEKDDDIEEGDLPEHKRPSAPVDFSKIDPSKPESILKMTKKGKTLMMFVTVSGSPTEKETEEITSLWQGSLFNANYDVQRFIVGSDRAIFMLRDGSYAWEIKDFLVGQDRCADVTLEGQVYPGKGGGSKEKNKTKQDKGKKKKEGDLKSRSSKEENRAGNKREDL

SEQ ID NO: 1192 - protein, 108 aa, Homo sapiens [sequence omitted]

SEQ ID NO: 1193 - protein, 108 aa, Homo sapiens [sequence omitted]

SEQ ID NO: 1194 - protein, 147 aa, Homo sapiens
  SITE (25): Xaa equals any of the naturally occurring L-amino acids
  SITE (30): Xaa equals any of the naturally occurring L-amino acids
  SITE (31): Xaa equals any of the naturally occurring L-amino acids
RLLHFNCHSGFLTQSPYCRQARHRXLHQGXXPAAARLWCDCQRPAPRVARTELGRHTGIHGSTFSSTTLGPIFWLLVKSPELAAQPSTYLAVAEELADVSGKYFDGLKQKAPAPEAEDEEVARRLWAESARLVGLEAPSVREQPLPR

SEQ ID NO: 1195 - protein, 240 aa, Homo sapiens; identical to SEQ ID NO: 700

SEQ ID NO: 1196 - protein, 174 aa, Homo sapiens
  SITE (142): Xaa equals any of the naturally occurring L-amino acids
  SITE (160): Xaa equals any of the naturally occurring L-amino acids
  SITE (162): Xaa equals any of the naturally occurring L-amino acids
MAVARLAAVAAWVPCRSWGWAAVPFGPHRGLSVLLARIPQRAPRWLPACRQKTSLSFLNRPDLPNLAYKKLKGKSPGIIFIPGYLSYMNGTKALAIEEFCKSLGHACIRFDYSGVGSSDGNSEESTLGKWRKDVLSIIDDLXDGPQILVGSSLGGWLMLXAXNCTTREGLALIG

SEQ ID NO: 1197 - protein, 160 aa, Homo sapiens
ILVGSSLGGWLMLHAAIARPEKVVALIGVATAADTLVTKFNQLPVELKKEVEMKGVWSMPSKYSEEGVYNVQYSFIKEAEHHCLLHSPIPVNCPIRLLHGMKDDIVPWHTSMQVADRVLSTDVDVILRKHSDHRMREKADIQLLVYTIDDLIDKLSTIVN

SEQ ID NO: 1198 - protein, 306 aa, Homo sapiens
MAVARLAAVAAWVPCRSWGWAAVPFGPHRGLSVLLARIPQRAPRWLPACRQKTSLSFLNRPDLPNLAYKKLKGKSPGIIFIPGYLSYMNGTKALAIEEFCKSLGHACIRFDYSGVGSSDGNSEESTLGKWRKDVLSIIDDLADGPQILVGSSLGGWLMLHAAIARPEKVVALIGVATAADTLVTKFNQLPVELKKEVEMKGVWSMPSKYSEEGVYNVQYSFIKEAEHHCLLHSPIPVNCPIRLLHGMKDDIVPWHTSMQVADRVLSTDVDVILRKHSDHRMREKADIQLLVYTIDDLIDKLSTIVN

SEQ ID NO: 1199 - protein, 205 aa, Homo sapiens
  SITE (40): Xaa equals any of the naturally occurring L-amino acids
  SITE (189): Xaa equals any of the naturally occurring L-amino acids
MGSWALLWPPLLFTGLLVRPPGTMAQAQYCSVNKDIFEVXENTNVTEPLVDIHVPEGQEVTLGALSTPFAFRIQGNQLFLNVTPDYEEKSLLEAQLLCQSGGTLVTQLRVFVSVLDVNDNAPEFPFKTKEIRVEEDTKVNSTVIPETQLQAEDRDKDDILVYTLQEMTAGASGLLLLVSVNRPPELDRXLTSTSGEHDLLLAGAD

SEQ ID NO: 1200 - protein, 124 aa, Homo sapiens
PQGQLGARPQPHARPQARGGTDARRARTPRPCLPRRCPEPPAAARAGGSPTAVRSILTKERRPEGGYKAVWFGEDIGTEADVVVLNAPTLDVDGASDSGSGDEGEGAGRGGGPYDAPGGDDSYI

SEQ ID NO: 1201 - protein, 447 aa, Homo sapiens
  SITE (260): Xaa equals any of the naturally occurring L-amino acids
FPAGAASTVLAHNKMLKVSAVLCVCAAAWCSQSLAAAAAVAAAGGRSDGGNFLDDKQWLTTISQYDKEVGQWNKFRDDDYFRTWSPGKPFDQALDPAKDPCLKMKCSRHKVCIAQDSQTAVCISHRRLTHRMKEAGVDHRQWRGPILSTCKQCPVVYPSPVCGSDGHTYSFQCKLEYQACVLGKQISVKCEGHCPCPSDKPTSTSRNVKRACSDLEFREVANRLRDWFKALHESGSQNKKTKTLLRPERSRFDTSILPIXKDSLGWMFNRLDTNYDLLLDQSELRSIYLDKNEQCTKAFFNSCDTYKDSLISNNEWCYCFQRQQDPPCQTELSNIQKRQGVKKLLGQYIPLCDEDGYYKPTQCHGSVGQCWCVDRYGNEVMGSRINGVADCAIDFEISGDFASGDFHEWTDDEDDEDDIMNDEDEIEDDDEDEGDDDDGGDDHDVYI

SEQ ID NO: 1202 - protein, 551 aa, Homo sapiens
MGSWALLWPPLLFTGLLVRPPGTMAQAQYCSVNKDIFEVEENTNVTEPLVDIHVPEGQEVTLGALSTPFAFRIQGNQLFLNVTPDYEEKSLLEAQLLCQSGGTLVTQLRVFVSVLDVNDNAPEFPFKTKEIRVEEDTKVNSTVIPETQLQAEDRDKDDILFYTLQEMTAGASDYFSLVSVNRPALRLDRPLDFYERPNMTFWLLVRDTPGENVEPSHTATATLVLNVVPADLRPPWFLPCTFSDGYVCIQAQYHGAVPTGHILPSPLVLRPGPIYAEDGDRGINQPIIYSIFRGNVNGTFIIHPDSGNLTVARSVPSPMTFLLLVKGQQADLARYSVTQVTVEAVAAAGSPPRFPQSLYRGTVARGAGAGVVVKDAAAPSQPLRIQAQDPEFSDLNSAITYRITNHSHFRMEGEVVLTTTTLAQAGAFYAEVAAPRRTSASRWWIWRPWAGCWVRCCCWLSLASPSLSTSTMAPGSSAALAKLRSPSPKALTTRRSSLTTRPTGRPSPAPRTTPSPRRHRCPQSPHPPALPPQAVPLSPPQRPELAEAPRR

SEQ ID NO: 1203 - protein, 71 aa, Homo sapiens
  SITE (18): Xaa equals any of the naturally occurring L-amino acids
  SITE (57): Xaa equals any of the naturally occurring L-amino acids
FCKGQAALALAACGVLLXSGGPAAAWEADPAGRCGRVPTARGRSWRKPLCGAFQPGXSWPEAPRRCRTSPC

SEQ ID NO: 1204 - protein, 52 aa, Homo sapiens
  SITE (3): Xaa equals any of the naturally occurring L-amino acids
  SITE (4): Xaa equals any of the naturally occurring L-amino acids
  SITE (25): Xaa equals any of the naturally occurring L-amino acids
  SITE (37): Xaa equals any of the naturally occurring L-amino acids
  SITE (49): Xaa equals any of the naturally occurring L-amino acids
NSXXDPDNVLWPGRWTQFCCIKVKXDFQEEASVGVSXGGYRIGVDENQXKGC

SEQ ID NO: 1205 - protein, 138 aa, Homo sapiens
VFCKGQAALALAACGVLLGSGGPAAAWEADPRGQVWPCPDRARTEVGGSPCAVPSSPEEAGLKPPGVAEASPCQRPKPRLGFYRCSFPSTWSPSTPSSPNSQPPFFFFLHASKVQGPQMYRSLMYHPAREPADYQAKK

SEQ ID NO: 1206 - protein, 193 aa, Homo sapiens
  SITE (140): Xaa equals any of the naturally occurring L-amino acids
  SITE (142): Xaa equals any of the naturally occurring L-amino acids
  SITE (147): Xaa equals any of the naturally occurring L-amino acids
  SITE (155): Xaa equals any of the naturally occurring L-amino acids
  SITE (162): Xaa equals any of the naturally occurring L-amino acids
MAGPTCRSLLLLKCLAEGRCLVCPSPSVVHCLVSVVFQMTILRDLEKLAGWHRIAIIFILSGITGNLASAIFLPYRAEVGPAGSQFGLLACSSWSSSRAGRCWRGPGRPSSTSRPSCSSWSSVASCPGSTHRPHLRASSXAXLLAFXFLPYITFXHQATSTXSGHLIPGGHLAGPLAGPSLARPFGAWGLGTF

SEQ ID NO: 1207 - protein, 349 aa, Homo sapiens
GKLVRLQVPVRNSRVDPRVRDDTGPPMDKSDLGQKRTSGAVCHQDPRTCEEPASSGAHIWPDDITKWPICTEQARSNHTGFLHVDCEIKGRPCCIGTKGSCEITTREYCEFMHGYFHEEATLCSQVHCLDKVCGLLPFLNPEVPDQFYRLWLSLFLHAGVVHCLVSVVFQMTILRDLEKLAGWHRIAIIFILSGITGNLASAIFLPYRAEVGPAGSQFGLLACLFVELFQSWPLLERPWKAFLNLSAIVLFLFICGLLPWIDNIAHIFGFLSGLLLAFAFLPYITFGTSDKYRKRALILVSLLAFAGLFAALVLWLYIYPINWPWIEHLTCFPFTSRFCEKYELDQVLH

SEQ ID NO: 1208 - protein, 217 aa, Homo sapiens [sequence omitted]

SEQ ID NO: 1209 - protein, 207 aa, Homo sapiens
  SITE (70): Xaa equals any of the naturally occurring L-amino acids
  SITE (71): Xaa equals any of the naturally occurring L-amino acids
  SITE (72): Xaa equals any of the naturally occurring L-amino acids
  SITE (73): Xaa equals any of the naturally occurring L-amino acids
  SITE (75): Xaa equals any of the naturally occurring L-amino acids
  SITE (81): Xaa equals any of the naturally occurring L-amino acids
  SITE (89): Xaa equals any of the naturally occurring L-amino acids
  SITE (90): Xaa equals any of the naturally occurring L-amino acids
  SITE (95): Xaa equals any of the naturally occurring L-amino acids
  SITE (97): Xaa equals any of the naturally occurring L-amino acids
  SITE (99): Xaa equals any of the naturally occurring L-amino acids
  SITE (105): Xaa equals any of the naturally occurring L-amino acids
  SITE (127): Xaa equals any of the naturally occurring L-amino acids
  SITE (141): Xaa equals any of the naturally occurring L-amino acids
  SITE (169): Xaa equals any of the naturally occurring L-amino acids
  SITE (178): Xaa equals any of the naturally occurring L-amino acids
  SITE (187): Xaa equals any of the naturally occurring L-amino acids
  SITE (194): Xaa equals any of the naturally occurring L-amino acids
MYYIAHLLKGALLFITIALIGSGWAFIKYVLSDKEKKVFGIVIPMQVLATWPTSSSSPARKAPATTCCGXXXXPXGPHLLXCHPVPVVXXHPASXGXVXPQDGKXASEPGQSLKLVPGIYYVMGHLXRLLSPGSIGHPACXVAWCPFSSGKWACTQASWVGRASTLGPXFGAYRAYKXSGPQGNKPXTLNLPKXGQGGMVKMEQVMD

SEQ ID NO: 1210 - protein, 553 aa, Homo sapiens
VDPRVRVAPEMAVSERRGLGRGSPAEWGQRLLLVLLLGGCSGRIHRLALTGEKRADIQLNSFGFYTNGSLEVELSVLRLGLREAEEKSLLVGFSLSRVRSGRVRSYSTRDFQDCPLQKNSSSFLVLFLINTKDLQVQVRKYGEQKTLFIFPGLLPEAPSKPGLPKPQATVPRKVDGGGTSAASKPKSTPAVIQGPSGKDKDLVLGLSHLNNSYNFSFHVVIGSQAEEGQYSLNFHNCNNSVPGKEHPFDITVMIREKNPDGFLSAAEMPLFKLYMVMSACFLAAGIFWVSILCRNTYSVFKIHWLMAALAFTKSISLLFHSINYYFINSQGHPIEGLAVMYYIAHLLKGALLFITIALIGSGWAFIKYVLSDKEKKVFGIVIPMQVLANVAYIIIESREEGASDYVLWKEILFLVDLICCGAILFPVVWSIRHLQDASGTDGKVAVNLAKLKLFRHYYVMVICYVYFTRIIAILLQVAVPFQWQWLYQLLVEGSTLAFFVLTGYKFQPTGNNPYLQLPQEDEEDVQMEQVMTDSGFREGLSKVNKTASGRELL

SEQ ID NO: 1211 - protein, 543 aa, Homo sapiens [sequence omitted]

SEQ ID NO: 1212 - protein, 204 aa, Homo sapiens
  SITE (162): Xaa equals any of the naturally occurring L-amino acids
  SITE (204): Xaa equals any of the naturally occurring L-amino acids
MAALAYNLGKREINHYFSVRSAKVLALVAVLLLAACHLASRRYRGNDSCEYLLSSGRFLGEKVWQPHSCMMHKYKISEAKNCLVDKHIAFIGDSRIRQLFYSFVKIINPQFKEEGNKHENIPFEDKTASVKVDFLWHPEVNGSMKQCIKVWTEDSIAKPHVXVAGAATWSIKIHNGSSEALSQYKMNITFIAPLLEKLAKTSDX

SEQ ID NO: 1213 - protein, 85 aa, Homo sapiens
  SITE (15): Xaa equals any of the naturally occurring L-amino acids
ELHKPFEYLIQDNGXVLLLQNNVYVCMYIWFSIYIKGLDEPPKNWLRTLQWNLQASICKSARHKTTCSLRAKRMRFSQILIILNV

SEQ ID NO: 1214 - protein, 289 aa, Homo sapiens
MAALAYNLGKREINHYFSVRSAKVLALVAVLLLAACHLASRRYRGNDSCEYLLSSGRFLGEKVWQPHSCMMHKYKISEAKNCLVDKHIAFIGDSRIRQLFYSFVKIINPQFKEEGNKHENIPFEDKTASVKVDFLWHPEVNGSMKQCIKVWTEDSIAKPHVIVAGAATWSIKIHNGSSEALSQYKMNITSIAPLLEKLAKTSDVYWVLQDPVYEDLLSENRKMITNEKIDAYNEAAVSILNSSTRNSKSNVKMFSVSKLIAQETIMESLDGLHLPESSRETVRNFYICQ

SEQ ID NO: 1215 - protein, 215 aa, Homo sapiens
CEVRPEVLFLTRHFIFHDNNNTWEGHYYHYSDPVCKHPTFSIYARGRYSRGVLSSRVMGGTEFVFKVNHMKVTPMDAATASLLNVFNGNECGAEGSWQVGIQQDVTHTNGCVALGIKLPHTEYEIFKMEQDARGRYLLFNGQRPSDGSSPDRPEKRATSYQMPLVQCASSSPRAEDLAEDSGSSLYGRAPGRHTWSLLLAALACLVPLLHWNIRR

SEQ ID NO: 1216 - protein, 466 aa, Homo sapiens
  SITE (268): Xaa equals any of the naturally occurring L-amino acids
  SITE (458): Xaa equals any of the naturally occurring L-amino acids
  SITE (460): Xaa equals any of the naturally occurring L-amino acids
  SITE (461): Xaa equals any of the naturally occurring L-amino acids
  SITE (463): Xaa equals any of the naturally occurring L-amino acids
MSWPRRLLLRYLFPALLLHGLGEGSALLHPDSRSHPRSLEKSAWRAFKESQCHHMLKHLHNGARITVQMPPTIEGHWVSTGCEVRSGPEFITRSYRFYHNNTFKAYQFYYGSNRCTNPTYTLIIRGKIRLRQASWIIRGGTEADYQLHNVQVICHTEAVAEKLGQQVNRTCPGFLADGGPWVQDVAYDLWREENGCECTKAVNFAMHELQLIRVEKQYLHHNLDHLVEELFLGDIHTDATQRMFYRPSSYQPPLQNAKNHDHACIACXIIYRSDEHHPPILPPKADLTIGLHGEWVSQRCEVRPEVLFLTRHFIFHDNNNTWEGHYYHYSDPVCKHPTFSIYARGRYSRGVLSSRVMGGTEFVFKVNHMKVTPMDAATASLLNVFNGNECGAEGSWQVGIQQDVTHTNGCVALGIKLPHTEYEIFKMEQDARGRYLLFNGQRPSDGSSPDRPRRKKGXKXXKXAPP

SEQ ID NO: 1217 - protein, 514 aa, Homo sapiens
MSWPRRLLLRYLFPALLLHGLGEGSALLHPDSRSHPRSLEKSAWRAFKESQCHHMLKHLHNGARITVQMPPTIEGHWVSTGCEVRSGPEFITRSYRFYHNNTFKAYQFYYGSNRCTNPTYTLIIRGKIRLRQASWIIRGGTEADYQLHNVQVICHTEAVAEKLGQQVNRTCPGFLADGGPWVQDVAYDLWREENGCECTKAVNFAMHELQLIRVEKQYLHHNLDHLVEELFLGDIHTDATQRMFYRPSSYQPPLQNAKNHDHACIACRIIYRSDEHHPPILPPKADLTIGLHGEWVSQRCEVRPEVLFLTRHFIFHDNNNTWEGHYYHYSDPVCKHPTFSIYARGRYSRGVLSSRVMGGTEFVFKVNHMKVTPMDAATASLLNVFNGNECGAEGSWQVGIQQDVTHTNGCVALGIKLPHTEYEIFKMEQDARGRYLLFNGQRPSDGSSPDRPEKRATSYQMPLVQCASSSPRAEDLAEDSGSSLYGRAPGRHTWSLLLAALACLVPLLHWNIRR

SEQ ID NO: 1218 - protein, 36 aa, Homo sapiens
MNNSIAAQASKFVILYLFILSFPKQCICHILSEMVW

SEQ ID NO: 1219 - protein, 101 aa, Homo sapiens [sequence omitted]

SEQ ID NO: 1220 - protein, 178 aa, Homo sapiens
HLLEVTPCRLPVPEFPGRTPRGSRTPDMRRLLLVTSLVVVLLWEAGAVPAPKVPIKMQVKHWPSEQDPEKAWGARVVEPPEKDDQLVVLFPVQKPKLLTTEEKPRGQGRGPILPGTKAWMETEDTLGRVLSPEPDHDSLYHPPPEEDQGEERPRLWVMPNHQVLLGPEEDQDHIYHPQ

SEQ ID NO: 1221 - protein, 40 aa, Homo sapiens
MNNSIAAQASKFVILYLFILSFPKQCICHILVRWSGKSHF

SEQ ID NO: 1222 - protein, 39 aa, Homo sapiens [sequence omitted]

SEQ ID NO: 1223 - protein, 54 aa, Homo sapiens
GTLQRGFLLCSLVPGWGWGTPAALTDGSPFSLSGHPSPTLTCTKFSPQLLCVAP

SEQ ID NO: 1224 - protein, 39 aa, Homo sapiens [sequence omitted]

SEQ ID NO: 1225 - protein, 167 aa, Homo sapiens
  SITE (165): Xaa equals any of the naturally occurring L-amino acids
MSLYLCVSLLISLSLSLNVSVSVSLRLCLYFSPPLSDAISLCLSLSLSVSPFLSPSLALCFLCLCLFLAQSRALGMRTRVSQGWLQLDTSGIPASPGPSKGERYVTFGVVGGAGSNLAVHSARPLIGNLLSVGPTSTLTPTRGLSWQSIAASPSSTGHAKFRETXKN

SEQ ID NO: 1226 - protein, 71 aa, Homo sapiens
  SITE (4): Xaa equals any of the naturally occurring L-amino acids
  SITE (60): Xaa equals any of the naturally occurring L-amino acids
QLRXLRDSIPEQFCNRLKAPGNRTHISGCLGGGQDLGGPERVFWDDGIFCILTVWCLHRXQHLSEINGLSL

SEQ ID NO: 1227 - protein, 114 aa, Homo sapiens
MSLYLCVSLLISLSLSLNVSVSVSLRLCLYFSPPLSDAISLCLSLSLSVSPFLSPSLALCFLCLCLFLAQSRALGMRTRVSQGWLQLDTSGIPASPGPSKGERYVYFRGGRGCG

SEQ ID NO: 1228 - protein, 123 aa, Homo sapiens
  SITE (5): Xaa equals any of the naturally occurring L-amino acids
MAALXTVLFTGVRRLHCSAAAWAGGQWRLQQGLAANPSGYGPLTELPDWSYADGRPAPPMKGQLRRKAERETFARRVVLLSQEMDAGLQAWQLRQQKLQEEQRKQENALKPKGASLKSPLPSQ

SEQ ID NO: 1229 - protein, 123 aa, Homo sapiens [sequence omitted]

SEQ ID NO: 1230 - protein, 128 aa, Homo sapiens
MGSAPWAPVLLLALGLRGLQAGARRAPDPGFQERFFQQRLDHFNFERFGNKTFPQRFLVSDRFWVRGEGPIFFYTGNEGDVWAFANNSAFVAELAAERGALLVFAEHRYYGKSLPFGAQSTQRGTRSC

SEQ ID NO: 1231 - protein, 492 aa, Homo sapiens [sequence omitted]

SEQ ID NO: 1232 - protein, 492 aa, Homo sapiens
  SITE (89): Xaa equals any of the naturally occurring L-amino acids
MGSAPWAPVLLLALGLRGLQAGARRAPDPGFQERFFQQRLDHFNFERFGNKTFPQRFLVSDRFWVRGEGPIFFYTGNEGDVWAFANNSXFVAELAAERGALLVFAEHRYYGKSLPFGAQSTQRGHTELLTVEQALADFAELLRALRRDLGAQDAPAIAFGGSYGGMLSAYLRMKYPHLVAGALAASAPVLAVAGLGDSNQFFRDVTADFEGQSPKCTQGVREAFRQIKDLFLQGAYDTVRWEFGTCQPLSDEKDLTQLFMFARNAFTVLAMMDYPYPTDFLGPLPANPVKVGCDRLLSEAQRITGLRALAGLVYNASGSEHCYDIYRLYHSCADPTGCGTGPDARAWDYQACTEINLTFASNNVTDMFPDLPFTDELRQRYCLDTWGVWPRPDWLLTSFWGGDLRAASNIIFSNGNLDPWAGGGIRRNLSASVIAVTIQGGAHHLDLRASHPEDPASVVEARKLEATIIGEWVKAARREQQPALRGGPRLSL

SEQ ID NO: 1233 - protein, 184 aa, Homo sapiens [sequence omitted]

SEQ ID NO: 1234 - protein, 130 aa, Homo sapiens
MFLELSQALLLLGLPRAPTLFPALPEGPTSLGEQWPPQLPPHLGAPPAAEGAVAMVGCGEGRGGKPLCCSPAQSPAQRVRSGGDKEPITTTEVSLILLHSRCFNLTKLKKTAFAMKKKKKKKKKKKKKKK

SEQ ID NO: 1235 - protein, 133 aa, Homo sapiens
MFLELSQALLLLGLPRAPTLFPALPEGPTSLGEQWPPQLPPHLGAPPAAEGAVAMVGCGEGRGGKPLCCSPAQSPAQRVRSGGDKEPITTTEVSLILLHSRCFNLTKLKKTAFAMKKKKKKKKKKKKKKKKKK

SEQ ID NO: 1236 - protein, 399 aa, Homo sapiens
MGILLGLLLLGHLTVDTYGRPILEVPESVTGPWKGDVNLPCTYDPLQGYTQVLVKWLVQRGSDPVTIFLRDSSGDHIQQAKYQGRLHVSHKVPGDVSLQLSTLEMDDRSHYTCEVTWQTPDGNQVVRDKITELRVQKLSVSKPTVTTGSGYGFTVPQGMRISLQCQARGSPPISYIWYKQQTNNQEPIKVATLSTLLFKPAVIADSGSYFCTAKGQVGSEQHSDIVKFVVKDSSKLLKTKTEAPTTMTYPLKATSTVKQSWDWTTDMDGYLGETSAGPGKSLPVFAIILIISLCCMVVFTMAYIMLCRKTSQQEHVYEAARAHAREANDSGETMRVAIFASGCSSDEPTSQNLGNNYSDEPCIGQEYQIIAQINGNYARLLDTVPLDYEFLATEGKSVC

SEQ ID NO: 1237 - protein, 399 aa, Homo sapiens; identical to SEQ ID NO: 1236

SEQ ID NO: 1238 - protein, 209 aa, Homo sapiens
  SITE (15): Xaa equals any of the naturally occurring L-amino acids
  SITE (18): Xaa equals any of the naturally occurring L-amino acids
  SITE (128): Xaa equals any of the naturally occurring L-amino acids
  SITE (147): Xaa equals any of the naturally occurring L-amino acids
  SITE (152): Xaa equals any of the naturally occurring L-amino acids
MAKFRRRTCIILALXILXIFSLMMGLKMLRPNTATFGAPFGLDLLPELHQRTIHLGKNFDFQKSDRINSETNTKNLKSVEITMKPSKASELNLDELPPLNNYLHVFYYSWYGNPQFDGKYIHWNHPVXEHWDPRIAKNYPQGRHNPXDDIGXSFYPELGSYSSRDPSVIETHMRQMRSASIGNYCIYIYMCVFVSVYMHINDFLCNFNS

SEQ ID NO: 1239 - protein, 81 aa, Homo sapiens [sequence omitted]

SEQ ID NO: 1240 - protein, 133 aa, Homo sapiens
MAKFRRRTCIILALFILFIFSLMMGLKMLRPNTATFGAPFGLDLLPELHQRTIHLGKNFDFQKSDRINSETNTKNLKSVEITMKPSKASELNLDELPPLNNYLHVFYYSWYGNPQFDGKYIHWNHPVLEHWDP

SEQ ID NO: 1241 - protein, 886 aa, Homo sapiens; identical to SEQ ID NO: 905
  SITE (26): Xaa equals any of the naturally occurring L-amino acids
  SITE (216): Xaa equals any of the naturally occurring L-amino acids
  SITE (234): Xaa equals any of the naturally occurring L-amino acids
  SITE (275): Xaa equals any of the naturally occurring L-amino acids
  SITE (871): Xaa equals any of the naturally occurring L-amino acids

SEQ ID NO: 1242 - protein, 831 aa, Homo sapiens
MAARGRGLLLLTLSVLLAAGPSAAAAKLNIPKVLLPFTRATRVNFTLEASEGCYRWLSTRPEVASIEPLGLDEQQCSQKAVVQARLTQPARLTSIIFAEDITTGQVLRCDAIVDLIHDIQIVSTTRELYLEDSPLELKIQALDSEGNTFSTLAGLVFEWTIVKDSEADRFSDSHNALRILTFLESTYIPPSYISEMEKAAKQGDTILVSGMKTGSSKLKARIQEAVYKNVRPAEVRLLILENILLNPAYDVYLMVGTSIHYKVQKIRQGKITELSMPSDQYELQLQNSIPGPEGDPTRPVAVLAQDTSMVTALQLGQSSLVLGHRSIRMQGASRLPNSTIYVVEPGYLGFTVHPGDRWVLETGRLYEITIEVFDKFSNKVYVSDNIRIETVLPAEFFEVLSSSQNGSYHRIRALKRGQTAIDAALTSVVDQDGGVHILQVPVWNQQEVEIHIPITLYPSILTFPWQPKTGAYQYTIRAHGGSGNFSWSSSSHLVATVTVKGVMTTGSDIGFSVIQAHDVQNPLHFGEMKVYVIEPHSMEFAPCQVEARVGQALELPLRISGLMPGGASEVVTLSDCSHFDLAVEVENQGVFQPLPGRLPPGSEHCSGVRVKAEAQGSTTLLVSYRHGHVHLSAKITIAAYLPLKAVDPSSVALVTLGSSKEMLFEGGPRPWILEPSKFFQNVTAEDTDSIGLALFAPHSSRNYQQHWILVTCQALGEQVIALSVGNKPSLTNPFPAVEPAVVKFVCAPPSRLTLVPVYTSPQLDMSCPLLQQNKQVVPVSSHRNPLLDLAAYDQEGRRFDNFSSLSIQWESTRPVLAASSLSCHAAGVPGR

SEQ ID NO: 1243 - protein, 89 aa, Homo sapiens
  SITE (39): Xaa equals any of the naturally occurring L-amino acids
  SITE (65): Xaa equals any of the naturally occurring L-amino acids
MPVPLLASAAWCHLCAGALPAWLWLPGGQLLHNGTCVPXTACPCTQHSLPWGLTLTLEEQAQELXPGTVLTRNCTPLCLPLWSLQLLPR

SEQ ID NO: 1244 - protein, 79 aa, Homo sapiens; identical to SEQ ID NO: 549

SEQ ID NO: 1245 - protein, 89 aa, Homo sapiens; identical to SEQ ID NO: 550

SEQ ID NO: 1246 - protein, 334 aa, Homo sapiens
  SITE (124): Xaa equals any of the naturally occurring L-amino acids
  SITE (129): Xaa equals any of the naturally occurring L-amino acids
  SITE (214): Xaa equals any of the naturally occurring L-amino acids
  SITE (224): Xaa equals any of the naturally occurring L-amino acids
MDQALSLWFLLGWIGGDSCNLIGSFLADQLPLQTYTAVYYVLADLVMLTLYFYYKFRTRPSLLSAPINSVLLFLMGMACATPLLSAAGPVAAPREAFRGRALLSVESGSKPFTRQEVIGFVIGXISSVXYLLSRLPQIRTNFLRKSTQGISYSLFALVMLGNTLYGLSVLLKNPEEGQSEGSYLLHHLPWLVGSLGVLLLDTIISIQFLVYRRXPPPRSLSPSXPADQNQAERRRTGTTGCHTRQEEVWTVMVRRPCISLRVASGSSVDRTVPPGTHLQVDPEASRPGLERRPQGLSGDSEAAPPTTYLILPTQDCPVNSRQLNKQAGYSGSHL

SEQ ID NO: 1247 - protein, 226 aa, Homo sapiens
MDQALSLWFLLGWIGGDSCNLIGSFLADQLPLQTYTAVYYVLADLVMLTLYFYYKFRTRPSLLSAPINSVLLFLMGMACATPLLSAAGPVAAPREAFRGRALLSVESGSKPFTRQEVIGFVIGSISSVLYLLSRLPQIRTNFLRKSTQGISYSLFALVMLGNTLYGLSVLLKNPEEGQSEGSYLLHHLPWLVGSLGVLLLDTIISIQFLVYRRSTAASELEPLLPS

SEQ ID NO: 1248 - protein, 184 aa, Homo sapiens
MKILVAFLVVLTIFGIQSHGYEVFNIISPSNNGGNVQETVTIDNEKNTAIINIHAGSCSSTTIFDYKHGYIASRVLSRRACFILKMDHQNIPPLNNLQWYIYEKQALDNMFSSKYTWVKYNPLESLIKDVDWFLLGSPIEKLCKHIPLYKGEVVENTHNVGAGGCAKAGLLGILGISICADIHV

SEQ ID NO: 1249 - protein, 184 aa, Homo sapiens; identical to SEQ ID NO: 1248

SEQ ID NO: 1250 - protein, 173 aa, Homo sapiens
MAVRALKLLTTLLAVVAAASQAEVESEAGWGMVTPDLLFAEGTAAYARGDWPGVVLSMERALRSRAALRALRLRCRTQCAADFPWELDPDWSPSPAQASGAAALRDLSFFGGLLRRAACLRRCLGPPAATRSAKRWSWSSASGPLQLPAGRLLQDQQVGESCCCSTHLLRGQS

SEQ ID NO: 1251 - protein, 359 aa, Homo sapiens
MAVRALKLLTTLLAVVAAASQAEVESEAGWGMVTPDLLFAEGTAAYARGDWPGVVLSMERALRSRAALRALRLRCRTQCAADFPWELDPDWSPSPAQASGAAALRDLSFFGGLLRRAACLRRCLGPPAAHSLSEEMELEFRKRSPYNYLQVAYFKINKLEKAVAAAHTFFVGNPEHMEMQQNLDYYQTMSGVKEADFKDLETQPHMQEFRLGVRLYSEEQPQEAVPHLEAALQEYFVAYEECRALCEGPYDYDGYNYLEYNADLFQAITDHYIQVLNCKQNCVTELASHPSREKPFEDFLPSHYNYLQFAYYNIGNYTQAVECAKTYLLFFPNDEVMNQNLALLCSYAWRRTHQIHRPP

SEQ ID NO: 1252 - protein, 77 aa, Homo sapiens
MTIFTPFLVLLLLVNSPRFSTITLMRSGFHNPSVCLSFTLKPQCYLVLMYQKNRRQDGSKVFFKTARLKFYLNITAK

SEQ ID NO: 1253 - protein, 77 aa, Homo sapiens; identical to SEQ ID NO: 1252

SEQ ID NO: 1254 - protein, 140 aa, Homo sapiens
  SITE (136): Xaa equals any of the naturally occurring L-amino acids
MASLGLQLVGYILGLLGLLGTLVAMLLPSWKTSSYVGASIVTAVGFSKGLWMECATHSTGITQCDIYSTLLGLPADIQAAQAMMVTSSAISSLACIISVVGMRCTVFCQESRAKDRVAVAGGVFFILGSLLGFIPXAWNL

SEQ ID NO: 1255 - protein, 86 aa, Homo sapiens
  SITE (33): Xaa equals any of the naturally occurring L-amino acids
  SITE (43): Xaa equals any of the naturally occurring L-amino acids
RRFYSPLVPDSMKFEIGEALYLGIISSLFSLIXGIILCFSCSXQRNRSNYYDAYQAQPLATRSSPRPGQPPKVKSEFNSYSLTGYV

SEQ ID NO: 1256 - protein, 230 aa, Homo sapiens
MASLGLQLVGYILGLLGLLGTLVAMLLPSWKTSSYVGASIVTAVGFSKGLWMECATHSTGITQCDIYSTLLGLPADIQAAQAMMVTSSAISSLACIISVVGMRCTVFCQESRAKDRVAVAGGVFFILGGLLGFIPVAWNLHGILRDFYSPLVPDSMKFEIGEALYLGIISSLFSLIAGIILCFSCSSQRNRSNYYDAYQAQPLATRSSPRPGQPPKVKSEFNSYSLTGYV

SEQ ID NO: 1257 - protein, 331 aa, Homo sapiens
MWLWEDQGGLLGPFSFLLLVLLLVTRSPVNACLLTGSLFVLLRVFSFEPVPSCRALQVLKPRDRISAIAHRGGSHDAPENTLAAIRQAAKNGATGVELDIEFTSDGIPVLMHDNTVDRTTDGTGRLCDLTFEQIRKLNPAANHRLRNDFPDEKIPTLREAVAECLNHNLTIFFDVKGHAHKATEALKKMYMEFPQLYNNSVVCSFLPEVIYKMRQTDRDVITALTHRPWSLSHTGDGKPRYDTFWKHFIFVMMDILLDWSMHNILWYLCGISAFLMQKDFVSPAYLKKWSAKGIQVVGWTVNTFDEKSYYESHLGSSYITDSMVEDCEPHF

SEQ ID NO: 1258 - protein, 27 aa, Homo sapiens
GTPAGTGPEFPGRPTRPIGVHLHSVRD

SEQ ID NO: 1259 - protein, 485 aa, Homo sapiens
ARGRLLPWWLAAGCSMSRLGALGGARAGLGLLLGTAAGLGFLCLLYSQRWKRTQRHGRSQSLPNSLDYTQTSDPGRHVMLLRAVPGGAGDASVLPSLPREGQEKVLDRLDFVLTSLVALRREVEELRSSLRGLAGEIVGEVRCHMEENQRVARRRRFPFVRERSDSTGSSSVYFTASSGATFTDAESEGGYTTANAESDNERDSDKESEDGEDEVSCETVKMGRKDSLDLEEEAASGASSALEAGGSSGLEDVLPLLQQADELHRGDEQGKREGFQLLLNNKLVYGSRQDFLWRLARAYSDMCELTEEVSEKKSYALDGKEEAEAALEKGDESADCHLWYAVLCGQLAEHESIQRRIQSGFSFKEHVDKAIALQPENPMAHFLLGRWCYQVSHLSWLEKKTATALLESPLSATVEDALQSFLKAEELQPGFSKAGRVYISKCYRELGKNSEARWWMKLALELPDVTKEDLAIQKDLEELEVILRD

SEQ ID NO: 1260 - protein, 470 aa, Homo sapiens
MSRLGALGGARAGLGLLLGTAAGLGFLCLLYSQRWKRTQRHGRSQSLPNSLDYTQTSDPGRHVMLLRAVPGGAGDASVLPSLPREGQEKVLDRLDFVLTSLVALRREVEELRSSLRGLAGEIVGEVRCHMEENQRVARRRRFPFVRERSDSTGSSSVYFTASSGATFTDAESEGGYTTANAESDNERDSDKESEDGEDEVSCETVKMGRKDSLDLEEEAASGASSALEAGGSSGLEDVLPLLQQADELHRGDEQGKREGFQLLLNNKLVYGSRQDFLWRLARAYSDMCELTEEVSEKKSYALDGKEEAEAALEKGDESADCHLWYAVLCGQLAEHESIQRRIQSGFSFKEHVDKAIALQPENPMAHFLLGRWCYQVSHLSWLEKKTATALLESPLSATVEDALQSFLKAEELQPGFSKAGRVYISKCYRELGKNSEARWWMKLALELPDVTKEDLAIQKDLEELEVILRD

SEQ ID NO: 1261 - protein, 37 aa, Homo sapiens
MPDKREATAAAVALFIVPLGVWMRGSRGYSAAHEGSL

SEQ ID NO: 1262 - protein, 37 aa, Homo sapiens; identical to SEQ ID NO: 1261

SEQ ID NO: 1263 - protein, 105 aa, Homo sapiens [sequence omitted]

SEQ ID NO: 1264 - protein, 105 aa, Homo sapiens [sequence omitted]

SEQ ID NO: 1265 - protein, 101 aa, Homo sapiens
  SITE (101): Xaa equals any of the naturally occurring L-amino acids
MTLCLVTFLTSLPTSVPACTSCWPGFMRSSKNAYDTHHWGGQRSMNLESLTCGQLAIRWTRGWMTRPRQVWAMPGQTVDVYLGRMLQGVVLRGQTLRGRAX

SEQ ID NO: 1266 - protein, 50 aa, Homo sapiens
KAVTGWAHWLTPIIPALWEAKAGRSLEVRISRPAWSTWQNLVSTKNTKIR

SEQ ID NO: 1267 - protein, 120 aa, Homo sapiens
EVLFSNDSVLGHFPHQSPNERARLYFLLAWFHAIIQERLRYAPLGWSKKYEFGESDLRSACDTVDTWLDDTAKASVGHARTDSGRVSGKDAAGRGAERPDSAWKSELTPRDRQSLAGHGE

SEQ ID NO: 1268 - protein, 103 aa, Homo sapiens
MMCVVLTTLPCLTFSIAVTEVQKSINGSADVLPDMLPDLPVSLVLLSLIMVDIIEKLRIYPLRGSQKSSENGHIHSTSLQHIKTVTEQVRQSPENAASPQATN

SEQ ID NO: 1269 - protein, 261 aa, Homo sapiens
MMCVVLTTLPCLTFSIAVTEVQKSINGSADVLPDMLPDLPVSLVLLSLIMVDIIEKLRIYPLRGSQKSSENGHIHSTSLQHIKTVTEQVRQSPENAASPQATNSTQVSQPSGAMTRSQESVFMGPQEPSCDSGILRMMSRRDVRAELFLWSFLLWSDTIEMVRVAGHPNVYKSSWLYPVYIFSFISLLRITFTPQNPLLNSLSVLLQDLPFVFVRLGLIIALGTITPVLGLCKNILVTLSYIYFNYLTRIRIFSAFEMSPF

SEQ ID NO: 1270 - protein, 277 aa, Homo sapiens
  SITE (158): Xaa equals any of the naturally occurring L-amino acids
  SITE (277): Xaa equals any of the naturally occurring L-amino acids
MGLRSWLAAPWGALPPRPPLLLLLLLLLLLQPPPPTWALSPRISLPLGSEERPFLRFEAEHISNYTALLLSRDGRTLYVGAREALFALSSNLSFLPGGEYQELLWGADAEKKQQCSFKGKDPQRDCQNYIKILLPLSGSHLFTCGTAAFSPMCTYINXENFTLARDEKGNVLLEDGKGRCPFDPNFKSTALVVDGELYTGTVSSFQGNDPAISRSQSLRPTKTESSLNWLQDPAFVASAYIPESLGSLQGDDDKIYFFFSETGQEFEFFENTIVSGX

SEQ ID NO: 1271 - protein, 832 aa, Homo sapiens
MGLRSWLAAPWGALPPRPPLLLLLLLLLLLQPPPPTWALSPRISLPLGSEERPFLRFEAEHISNYTALLLSRDGRTLYVGAREALFALSSNLSFLPGGEYQELLWGADAEKKQQCSFKGKDPQRDCQNYIKILLPLSGSHLFTCGTAAFSPMCTYINMENFTLARDEKGNVLLEDGKGRCPFDPNFKSTALVVDGELYTGTVSSFQGNDPAISRSQSLRPTKTESSLNWLQDPAFVASAYIPESLGSLQGDDDKIYFFFSETGQEFEFFENTIVSRIARICKGDEGGERVLQQRWTSFLKAQLLCSRPDDGFPFNVLQDVFTLSPSPQDWRDTLFYGVFTSQWHRGTTEGSAVCVFTMKDVQRVFSGLYKEVNRETQQWYTVTHPVPTPRPGACITNSARERKINSSLQLPDRVLNFLKDHFLMDGQVRSRMLLLQPQARYQRVAVHRVPGLHHTYDVLFLGTGDGRLHKAVSVGPRVHIIEELQIFSSGQPVQNLLLDTHRGLLYAASHSGVVQVPMANCSLYRSCGDCLLARDPYCAWSGSSCKHVSLYQPQLATRPWIQDIEGASAKDLCSASSVVSPSFVPTGEKPCEQVQFQPNTVNTLACPLLSNLATRLWLRNGAPVNASASCHVLPTGDLLLVGTQQLGEFQCWSLEEGFQQLVASYCPEVVEDGVADQTDEGGSVPVIISTSRVSAPAGGKASWGADRSYWKEFLVMCTLFVLAVLLPVLFLLYRHRNSMKVFLKQGECASVHPKTCPVVLPPETRPLNGLGPPSTPLDHRGYQSLSDSPPGARVFTESEKRPLSIQDSFVEVSPVCPRPRVRLGSEIRDSVV

SEQ ID NO: 1272 - protein, 196 aa, Homo sapiens
  SITE (12): Xaa equals any of the naturally occurring L-amino acids
  SITE (22): Xaa equals any of the naturally occurring L-amino acids
  SITE (55): Xaa equals any of the naturally occurring L-amino acids
  SITE (147): Xaa equals any of the naturally occurring L-amino acids
  SITE (156): Xaa equals any of the naturally occurring L-amino acids
  SITE (184): Xaa equals any of the naturally occurring L-amino acids
MGKWKESLQNAXHLPPILLLRXIHLFCAVLAGGKENGQMAVSDGSVKGLLSVVRXWSRGPAPDPCLVPLALEALVGAVHVLHASRAPPRGPELRALLESYFHVLNADWPAGLSSGPEEALVTLRVSMLDAIPMMLHVKTGQCLQPPXSATIALNTXLGSFKNKQGSWTKTQTHCSPCSQSADLXHEVTPLGPRRWL

SEQ ID NO: 1273 - protein, 347 aa, Homo sapiens [sequence omitted]

SEQ ID NO: 1274 - protein, 347 aa, Homo sapiens [sequence omitted]

SEQ ID NO: 1275 - protein, 347 aa, Homo sapiens [sequence omitted]

SEQ ID NO: 1276 - protein, 286 aa, Homo sapiens
  SITE (173): Xaa equals any of the naturally occurring L-amino acids
MLMLMLLMMFAVHCTWVTSNAYSSPSVVLASYNHDGTRNILDDFREAYFWLRQNTDEHARVMSWWDYGYQIAGMANRTTLVDNNTWNNSHIALVGKAMSSNETAAYKIMRTLDVDYVLVIFGGVIGYSGDDINKFLWMVRIAEGEHPKDIRESDYFTPQGEFRVDKAGSPTLXNCLMYKMSYYRFGEMQLDFRTPPGFDRTRNAEIGNKDIKFKHLEEAFTSEHWLVRIYKVKAPDNRETLDHKPRVTNIFPKQKYLSKKTTKRKRGYIKNKLVFKKGKKISKKTV

SEQ ID NO: 1277 - protein, 286 aa, Homo sapiens
MLMLMLLMMFAVHCTWVTSNAYSSPSVVLASYNHDGTRNILDDFREAYFWLRQNTDEHARVMSWWDYGYQIAGMANRTTLVDNNTWNNSHIALVGKAMSSNETAAYKIMRTLDVDYVLVIFGGVIGYSGDDINKFLWMVRIAEGEHPKDIRESDYFTPQGEFRVDKAGSPTLLNCLMYKMSYYRFGEMQLDFRTPPGFDRTRNAEIGNKDIKFKHLEEAFTSEHWLVRIYKVKAPDNRETLDHKPRVTNIFPKQKYLSKKTTKRKRGYIKNKLVFKKGKKISKKTV

SEQ ID NO: 1278 - protein, 135 aa, Homo sapiens
  SITE (134): Xaa equals any of the naturally occurring L-amino acids
MSALRPLLLLLLPLCPGPGPGPGSEAKVTRSCAETRQVLGARGYSLNLIPPALISGEHLRVCPQEYTCCSSETEQRLIRETEATFRGLVEDSGSFLVHTLAARHRKFDDNPDPGGCPSLLCKAWRLEEMWSSEXA

SEQ ID NO: 1279 - protein, 134 aa, Homo sapiens
MSALRPLLLLLLPLCPGPGPGPGSEAKVTRSCAETRQVLGARGYSLNLIPPALISGEHLRVCPQEYTCCSSETEQRLIRETEATFRGLVEDSGSFLVHTLAARHRKFDDNPDPGGCPSLCAGPGDWKKCGQRCA

SEQ ID NO: 1280 - protein, 52 aa, Homo sapiens
  SITE (4): Xaa equals any of the naturally occurring L-amino acids
  SITE (25): Xaa equals any of the naturally occurring L-amino acids
CALXFEFFFFFFFLRWSLGNKARLXQKKKKKKKTSVGKNMENWNPDTLLVGL

SEQ ID NO: 1281 - protein, 17 aa, Homo sapiens
MRVVSGTLFIHFLVLIF

SEQ ID NO: 1282 - protein, 17 aa, Homo sapiens
MRVVSGTLFIHFLVLIF

SEQ ID NO: 1283 - protein, 182 aa, Homo sapiens
MAKRSRGPGRRCLLALVLFCAWGTLAVVAQKPGAGCPSRCLCFRTTVRCMHLLLEAVPAVAPQTSILDLRFNRIREIQPGAFRRLRNLNTLLLNNNQIKRIPSGAFEDLENLKYLYLHFNQIETLDPDSFQHLPKLERLFLHNNRITHLVPGTFNHLESMKRLRLDSNTLHCDCEILWLRIC

SEQ ID NO: 1284 - protein, 550 aa, Homo sapiens
ALPQQAAVAGIVQRSGKPLLPFATGPPTECMRDENESPIPCFLAGDHRANEQLGLTSMHTLWFREHNRIATELLKLNPHWDGDTIYYETRKIVGAEIQHITYQHWLPKILGEVGMRTLGEYHGYDPGINAGIFNAFATAAFRFGHTLVNPLLYRLDENFQPIAQDHLPLHKAFFSPFRIVNEGGIDPLLRGLFGVAGKMRVPSQLLNTELTERLFSMAHTVALDLAAINIQRGRDHGIPPYHDYRVYCNLSAAHTFEDLKNEIKNPEIREKLKRLYGSTLNIDLFPALVVEDLVPGSRLGPTLMCLLSTQFKRLRDGDRLWYENPGVFSPAQLTQIKQTSLARILCDNADNITRVQSDVFRVAEFPHGYGSCDEIPRVDLRVWQDCCEDCRTRGQFNAFSYHFRGRRSLEFSYQEDKPTKKTRPRKIPSVGRQGEHLSNSTSAFSTRSDASGTNDFREFVLEMQKTITDLRTQIKKLESRLSTTECVDAGGESHANNTKWKKDACTICECKDGQVTCFVEACPPATCAVPVNIPGACCPVCLQKRAEEKP

SEQ ID NO: 1285 - protein, 210 aa, Homo sapiens
  SITE (139): Xaa equals any of the naturally occurring L-amino acids
  SITE (187): Xaa equals any of the naturally occurring L-amino acids
MEAPGPRALRTALCGGCCCLLLCAQLAVAGKGARGFGRGALIRLNIWPAVQGACKQLEVCEHCVEGDRARNLSSCMWEQCRPEEPGHCVAQSEVVKEGCSIYNRSEACPAAHHHPTYEPKTVTTGSPPVPEAHSPGFDXASFIGGVVLVLSLQAVAFFVLTSSRPRTAPTRRCEYLASSKYLSPSSXLVPAHVPFSTQGAVFSTGKPSGR

SEQ ID NO: 1286 - protein, 173 aa, Homo sapiens
MEAPGPRALRTALCGGCCCLLLCAQLAVAGKGARGFGRGALIRLNIWPAVQGACKQLEVCEHCVEGDRARNLSSCMWEQCRPEEPGHCVAQSEVVKEGCSIYNRSEACPAAHHHPTYEPKTVTTGSPPVPEAHSPGFDGASFIGGVVLVLSLQAVAFFVLHFLKAKDSTYQTL

SEQ ID NO: 1287 - protein, 148 aa, Homo sapiens
MTWKIKLRSAVYLSDATVTTLGNLVPFTLTLLCFLLLICSLCKHLKKMQLHGKGSQDPSTKVHIKVLQTVIFFLLLCAIYFLSIMISVWSFGSLENKPVFMFCKAIRFSYPSIHPFILIWGNKKLKQTFLSVLRQVRYWVKGEKPSSP

SEQ ID NO: 1288 - protein, 55 aa, Homo sapiens
NERVLTYSLIGSSIIRKKCTVLFTAKFYLTVLILGVMKFKQCDLNLKKKKKKGRP

SEQ ID NO: 1289 - protein, 273 aa, Homo sapiens
  SITE (200): Xaa equals any of the naturally occurring L-amino acids
MRLPGVPLARPALLLLLPLLAPLLGTGAPAELRVRVRLPDGQVTEESLQADSDADSISLELRKPDGTLVSFTADFKKDVKVFRALILGELEKGQSQFQALCFVTQLQHNEIIPSEAMAKLRQKNPRAVRQAEEVRGLEHLHMDVAVNFSQGALLSPHLHNVCAEAVDAIYTRQEDVRFWLEQGVDSSVFEALPKASEQAXLPRCRQVGDRGKPCVCHYGLSLAWYPCMLKYCHSRDRPTPYKCGIRSCQKSYSFDFYVPQRQLCLWDEDPYPG

SEQ ID NO: 1290 - protein, 273 aa, Homo sapiens
  SITE (217): Xaa equals any of the naturally occurring L-amino acids
MRLPGVPLARPALLLLLPLLAPLLGTGAPAELRVRVRLPDGQVTEESLQADSDADSISLELRKPDGTLVSFTADFKKDVKVFRALILGELEKGQSQFQALCFVTQLQHNEIIPSEAMAKLRQKNPRAVRQAEEVRGLEHLHMDVAVNFSQGALLSPHLHNVCAEAVDAIYTRQEDVRFWLEQGVDSSVFEALPKASEQAELPRCRQVGDRGKPCVCXYGLSLAWYPCMLKYCHSRDRPTPYKCGIRSCQKSYSFDFYVPQRQLCLWDEDPYPG

SEQ ID NO: 1291 - protein, 934 aa, Homo sapiens
  SITE (225): Xaa equals any of the naturally occurring L-amino acids
  SITE (596): Xaa equals any of the naturally occurring L-amino acids
  SITE (852): Xaa equals any of the naturally occurring L-amino acids
MLAGCFLLILGQIVLLPAEARERSRGRSISRGRHARTHPQTALLESSCENKRADLVFIIDSSRSVNTHDYAKVKEFIVDILQFLDIGPDVTRVGLLQYGSTVKNEFSLKTFKRKSEVERAVKRMRHLSTGTMTGLAIQYALNIAFSEAEGARPLRENVPRVIMIVTDGRPQDSVAEVAAKARDTGILIFAIGVGQVDFNTLKSIGSEPHEDHVFLVANFSQIETXTSVFQKKLCTAHMCSTLEHNCAHFCINIPGSYVCRCKQGYILNSDQTTCRIQDLCAMEDHNCEQLCVNVPGSFVCQCYSGYALAEDGKRCVAVDYCASENHGCEHECVNADGSYLCQCHEGFALNPDEKTCTKIDYCASSNHGCQHECVNTDDSYSCHCLKGFTLNPDKKTCRRINYCALNKPGCEHECVNMEESYYCRCHRGYTLDPNGKTCSRVDHCAQQDHGCEQLCLNTEDSFVCQCSEGFLINEDLKTCSRVDYCLLSDHGCEYSCVNMDRSFACQCPEGHVLRSDGKTCAKLDSCALGDHGCEHSCVSSEDSFVCQCFEGYILREDGKTCRRKDVCQAIDHGCEHICVNSDDSYTCECLEGFRLXEDGKRCRRKDVCKSTHHGCEHICVNNGNSYICKCSEGFVLAEDGRRCKKCTEGPIDLVFVIDGSKSLGEENFEVVKQFVTGIIDSLTISPKAARVGLLQYSTQVHTEFTLRNFNSAKDMKKAVAHMKYMGKGSMTGLALKHMFERSFTQGEGARPLSTRVPRAAIVFTDGRAQDDVSEWASKAKANGITMYAVGVGKAIEEELQEIASEPTNKHLFYAEDFSTMDEISEKLKKGICEALEDSDGRQDSPAGELPKXVQQPTVQHRYLFEEDNLLRSTQKLSHSTKPSGSPLEEKHDQCKCENLIMFQNLANEEVRKLTQRLEEMTQRMEALENRLRYR

SEQ ID NO: 1292 - protein, 794 aa, Homo sapiens
MLAGCFLLILGQIVLLPAEARERSRGRSISRGRHARTHPQTALLESSCENKRADLVFIIDSSRSVNTHDYAKVKEFIVDILQFLDIGPDVTRVGLLQYGSTVKNEFSLKTFKRKSEVERAVKRMRHLSTGTMTGLAIQYALNIAFSEAEGARPLRENVPRVIMIVTDGRPQDSVAEVAAKARDTGILIFAIGVGQVDFNTLKSIGSEPHEDHVFLVANFSQIETLTSVFQKKLCTAHMCSTLEHNCAHFCINIPGSYVCRCKQGYILNSDQTTCRIQDLCAMEDHNCEQLCVNVPGSFVCQCYSGYALAEDGKRCVAVDYCASENHGCEHECVNADGSYLCQCHEGFALNPDEKTCTKIDYCASSNHGCQHECVNTDDSYSCHCLKGFTLNPDKKTCRRINYCALNKPGCEHECVNMEESYYCRCHRGYTLDPNGKTCSRVDHCAQQDHGCEQLCLNTEDSFVCQCSEGFLINEDLKTCSRVDYCLLSDHGCEYSCVNMDRSFACQCPEGHVLRSDGKTCAKLDSCALGDHGCEHSCVSSEDSFVCQCFEGYILREDGKTCRRKDVCQAIDHGCEHICVNSDDSYTCECLEGFRLAEDGKRCRRKDVCKSTHHGCEHICVNNGNSYICKCSEGFVLAEDGRRCKKCTEGPIDLVFVIDGSKSLGEENFEVVKQFVTGIIDSLTISPKAARVGLLQYSTQVHTEFTLRNFNSAKDMKKAVAHMKYMGKGSMTGLALKHMFERSFTQGEGARPLSTRVPRAAIVFTDGRAQDDVSEWASKARPWYHYVCCWGRKSH

SEQ ID NO: 1293 - protein, 39 aa, Homo sapiens
MRRPAAVPLLLLLCFGSQRAKAATACGRPRMLNRMVGGQ

SEQ ID NO: 1294 - protein, 290 aa, Homo sapiens
MRRPAAVPLLLLLCFGSQRAKAATACGRPRMLNRMVGGQDTQEGEWPWQVSIQRNGSHFCGGSLIAEQWVLTAAHCFRNTSETSLYQVLLGARQLVQPGPHAMYARVRQVESNPLYQGTASSADVALVELEAPVPFTNYILPVCLPDPSVIFETGMNCWVTGWGSPSEEDLLPEPRILQKLAVPIIDTPKCNLLYSKDTEFGYQPKTIKNDMLCAGFEEGKKDACKGDSGGPLVCLVGQSWLQAGVISWGEGCARQNRPGVYIRVTAHHNWIHRIIPKLQFQPARLGGQK

SEQ ID NO: 1295 - protein, 144 aa, Homo sapiens
  SITE (77): Xaa equals any of the naturally occurring L-amino acids
  SITE (122): Xaa equals any of the naturally occurring L-amino acids
  SITE (141): Xaa equals any of the naturally occurring L-amino acids
MLLGVGLVVLALIAGWVLQQANRSAQQLTATGQSLMQSQRLAKSVSQALVGSPQAFPDVVESSGVLARNVRALNGGXNELDVQALGEPFRPELDAITPLVERAERNAGVVMGQQKILTQVGXALRTIKPPVLGPCWRSRRXSSS

SEQ ID NO: 1296 - protein, 187 aa, Homo sapiens
  SITE (16): Xaa equals any of the naturally occurring L-amino acids
  SITE (72): Xaa equals any of the naturally occurring L-amino acids
TSRVWCPHVRRNRPSXQTAEPCAVNWKACKATVGTIGHGCGPAIALAVAGIFVLLCGVGISRVQLLDSRSRXATAEAQQRDAKRQEQEAKRINDANQAAILRLMNELQSVAEGDLTQEATVTEDITGAIADSVNYTVEESASWWATCRTPRPGWPRPPRRWTAPLRNCWRLRPSSCVKSVKRAVRCS

SEQ ID NO: 1297 - protein, 346 aa, Homo sapiens
MLLGVGLVVLALIAGWVLQQANRSAQQLTATGQSLMQSQRLAKSVSQALVGSPQAFPDVVESSGVLARNVRALNGGDNELDVQALGEPFRPELDAITPLVERAERNAGVVMGQQKILTQVGDALRTINRQSSDLLEIAETVSSLKLQQNAPASEISAAGQLVMLTQRIGKSANEFQTTEGVSPEAVFLLGKDLNSFKEIARGMLDGSADLRLAATRDAQTREQLESLIKLYEQTRTQAGAILGNLQGLVSAREAQSAILADSEPLRRQLEGLQSKLSAQSGMGAASSLRSPSPVSSSCCAAWVFRACSCWTAAAAKPRPKHSSVMPSARNRKPSASTTPTRRPFCD

SEQ ID NO: 1298 - protein, 29 aa, Homo sapiens
MHLVGGTLLVLAPRGAVLPLSSQSMPFLQ

SEQ ID NO: 1299 - protein, 29 aa, Homo sapiens
MHLVGGTLLVLAPRGAVLPLSSQSMPFLQ

SEQ ID NO: 1300 - protein, 299 aa, Homo sapiens
MGTKAQVERKLLCLFILAILLCSLALGSVTVHSSEPEVRIPENNPVKLSCAYSGFSSPRVEWKFDQGDTTRLVCYNNKITASYEDRVTFLPTGITFKSVTREDTGTYTCMVSEEGGNSYGEVKVKLIVLVPPSKPTVNIPSSATIGNRAVLTCSEQDGSPPSEYTWFKDGIVMPTNPKSTRAFSNSSYVLNPTTGELVFDPLSASDTGEYSCEARNGYGTPMTSNAVRMEAVERNVGVIVAAVLVTLILLGILVFGIWFAYSRGHFDRTKKGTSSKKVIYSQPSARSEGEFKQTSSFLV

SEQ ID NO: 1301 - protein, 299 aa, Homo sapiens; identical to SEQ ID NO: 1300

SEQ ID NO: 1302 - protein, 136 aa, Homo sapiens
ARAKPERPAGWAESVLEEDASELEPAFSRTVGTIQHCLHLTSVYTHFLPQRGRPEVTTMPLGLGMTVDYIFFSAESCENGNRTDHRLYRDGTLKLLGRLSLLSEEILWAANGLPNPFCSSDHLCLLASFGMEVTAP

SEQ ID NO: 1303 - protein, 100 aa, Homo sapiens
  SITE (22): Xaa equals any of the naturally occurring L-amino acids
  SITE (83): Xaa equals any of the naturally occurring L-amino acids
  SITE (92): Xaa equals any of the naturally occurring L-amino acids
  SITE (95): Xaa equals any of the naturally occurring L-amino acids
MIASCLCYLLLPATRLFRALSXAFFTCRKNVLLANSSSPQVEGDFAMAPRGPEQEECEGLLQQWREEGLSQVLSTASEGPLIXKGLAQSSLXLLXDNPGE

SEQ ID NO: 1304 - protein, 670 aa, Homo sapiens
MIASCLCYLLLPATRLFRALSDAFFTCRKNVLLANSSSPQVEGDFAMAPRGPEQEECEGLLQQWREEGLSQVLSTASEGPLIDKGLAQSSLALLMDNPGEENAASEDRWSSRQLSDLRAAENLDEPFPEMLGEEPLLEVEGVEGSMWAAIPMQSEPQYADCAALPVGALATEQWEEDPAVLAWSIAPEPVPQEEASIWPFEGLGQLQPPAVEIPYHEILWREWEDFSTQPDAQGLKAGDGPQFQFTLMSYNILAQDLMQQSSELYLHCHPDILNWNYRFVNLMQEFQHWDPDILCLQEVQEDHYWEQLEPSLRMMGFTCFYKRRTGCKTDGCAVCYKPTRFRLLCASPVEYFRPGLELLNRDNVGLVLLLQPLVPEGLGQVSVAPLCVANTHILYNPRRGDVKLAQMAILLAEVDKVARLSDGSHCPIILCGDLNSVPDSPLYNFIRDGELQYHGMPAWKVSGQEDFSHQLYQRKLQAPLWPSSLGITDCCQYVTSCHPKRSERRKYGRDFLLRFRFCSIACQRPVGLVLMEGVTDTKPERPAGWAESVLEEDASELEPAFSRTVGTIQHCLHLTSVYTHFLPQRGRPEVTTMPLGLGMTVDYIFFSAESCENGNRTDHRLYRDGTLKLLGRLSLLSEEILWAANGLPNPFCSSDHLCLLASFGMEVTAP

SEQ ID NO: 1305 - protein, 228 aa, Homo sapiens
  SITE (164): Xaa equals any of the naturally occurring L-amino acids
  SITE (167): Xaa equals any of the naturally occurring L-amino acids
  SITE (200): Xaa equals any of the naturally occurring L-amino acids
  SITE (206): Xaa equals any of the naturally occurring L-amino acids
  SITE (221): Xaa equals any of the naturally occurring L-amino acids
MAAAGSVKAALQVAEVLEAIVSCCVGPEGRQVLCTKPTGEVLLSRNGGRLLEALHLEHPIARMIVDCVSSHLKKTGDGAKTFIIFLCHLLRGLHAITDREKDPLMCENIQTHGRHWKNCSRWKFISQALLTFQTQILDGIMDQYLSRHFLSIFSSAKERTLCRXSLXLLLEAYFCGKVGRNNHKFISQLMCDYFFKCMTXKSGIGXFELGDDHFVKLNVGXLAFLFKF

SEQ ID NO: 1306 - protein, 170 aa, Homo sapiens
MAAAGSVKAALQVAEVLEAIVSCCVGPEGRQVLCTKPTGEVLLSRNGGRLLEALHLEHPIARMIVDCVSSHLKKTGDGAKTFIIFLCHLLRGLHAITDREKDPLMCENIQTHGRHWKNCSRWKFISQALLTFQTQILDGIMDQYLSRHFLSIFSSAKERTLCRSSLESVS

SEQ ID NO: 1307 - protein, 149 aa, Homo sapiens
  SITE (87): Xaa equals any of the naturally occurring L-amino acids
  SITE (95): Xaa equals any of the naturally occurring L-amino acids
  SITE (107): Xaa equals any of the naturally occurring L-amino acids
MGAPLLSPGWGAGAAGRRWWMLLAPLLPALLLVRPAGALVEGLYCGTRDCYEVLGVSRSAGKAEIARAYRQLARRYHPDRYRPQPGXEGPGRTPXSAEEAFLLVATXYETLKDEETRKDYDYMLDHPEEYYSHYYHYYSRRLALRWMLE

SEQ ID NO: 1308 - protein, 360 aa, Homo sapiens
MGAPLLSPGWGAGAAGRRWWMLLAPLLPALLLVRPAGALVEGLYCGTRDCYEVLGVSRSAGKAEIARAYRQLARRYHPDRYRPQPGDEGPGRTPQSAEEAFLLVATAYETLKDEETRKDYDYMLDHPEEYYSHYYHYYSRRLAPKVDVRVVILVSVCAISVFQFFSWWNSYNKAISYLATVPKYRIQATEIAKQQGLLKKAKEKGKNKKSKEEIRDEEENIIKNIIKSKIDIKGGYQKPQICDLLLFQIILAPFHLCSYIVWYCRWIYNFNIKGKEYGEEERLYIIRKSMKMSKSQFDSLEDHQKETFLKRELWIKENYEVYKQEQEEELKKKLANDPRWKRYRRWMKNEGPGRLTFVDD

SEQ ID NO: 1309 - protein, 128 aa, Homo sapiens
  SITE (122): Xaa equals any of the naturally occurring L-amino acids
MESHLSTWPCHPSCCLFLILLFPSHPTSMTKSKARLPHLENCSQNDTSKPLGQARPPSSPTRTTDLTTGPTSSPAPLGILHTAVRVTHLHTLTLMGEEKAVFVARAQVGNLGLVFRKARGSXFPTLGR

SEQ ID NO: 1310 - protein, 112 aa, Homo sapiens
MESHLSTWPCHPSCCLFLILLFPSHPTSMTKSKARLPHLENCSQNDTSKPLGQARPPSSPTRTTDLTTGPTSSPAPLGILHTAVRVTHLHTLTLMGEEKAVFVARAQVGTLA

SEQ ID NO: 1311 - protein, 108 aa, Homo sapiens
MFVSVTAFFFSLLFLGMFLSGMVAQIDANWNFLDFAYHFTVFVFYFGAFLLEAAATSLHDLHCNTTITGQPLLSDNQYNINVAASIFAFMTTACYGCSLGLALRRWRP

SEQ ID NO: 1312 - protein, 77 aa, Homo sapiens
NHIQHKNYFWLNSTEKYFNLPVEILVMERCQTVLNGRTSKSEATVPTTRGLLYCSTFSALYFLAEASPWSAMYKLGY

SEQ ID NO: 1313 - protein, 108 aa, Homo sapiens
MFVSVTAFFFSLLFLGMFLSGMVAQIDANWNFLDFAYHFTVFVFYFGAFLLEAAATSLHDLHCNTTITGQPLLSDNQYNINVAASIFAFMTTAWYGCSLGLALRRWRP

SEQ ID NO: 1314 - protein, 176 aa, Homo sapiens
MSAGGASVPPPPNPAVSFPPPRVTLPAGPDILRTYSGAFVCLEILFGGLVWILVASSNVPLPLLQGWVMFVSVTAFFFSLLFLGMFLSGMVAQIDANWNFLDFAYHFTVFVFYFGAFLLEAAATSLHDLHCNTTITGQPLLSDNQYNINVAASIFAFMTTACYGCSLGLALRRWRP

SEQ ID NO: 1315 - protein, 103 aa, Homo sapiens
MPLCSLLTCLGLNVLFLTLNEGAWYSVGALMISVPALLGYLQEVCRARLPDSELMRRKYHSVRQEDLQRVRLSRPEAVAEVKSFLIQLEAFLKPPVLHMLKPP

SEQ ID NO: 1316 - protein, 237 aa, Homo sapiens
MPLCSLLTCLGLNVLFLTLNEGAWYSVGALMISVPALLGYLQEVCRARLPDSELMRRKYHSVRQEDLQRVRLSRPEAVAEVKSFLIQLEAFLSRLCCTCEAAYRVLHWENPVVSSQFYGALLGTVCMLYLLPLCWVLTLLNSTLFLGNVEFFRVVSEYRASLQQRMNPKQEEHAFESPPPPDVGGKDGLMDSTPALTPTEDLTPGSVEEAEEAEPDEEFKDAIDEDDEGAPCPALFL

SEQ ID NO: 1317 - protein, 165 aa, Homo sapiens
  SITE (54): Xaa equals any of the naturally occurring L-amino acids
  SITE (62): Xaa equals any of the naturally occurring L-amino acids
  SITE (64): Xaa equals any of the naturally occurring L-amino acids
  SITE (96): Xaa equals any of the naturally occurring L-amino acids
MARLGAVRSHYCALLLAAALAVCAFYYLGSGRETFSSATKRLKEARAGAPAAPXPPALELAXGXVAPAPGAKAKSLEGGGAGPVDYHLLMMFTKAXHNAALQAKARVALRSLLRLAKFEAHEVLNLHFVSEEASREVAKGLLRELLPPPLASSARSSSTICCADG

SEQ ID NO: 1318 - protein, 159 aa, Homo sapiens
ASKRMPAHHILTLGGCCTRILLMLTSLGVGFRIASLRKDFRTNWGLHKKTYLIIRVLTACISQLHPRTPLSFIPPNQLQVTRLYSESKFVIKEQRLATTRTCRRTVGTRKTHSKKPRPGTVVKPVIPTLWETEVGVSIEPRRSRSAWETQGGPHRYKIF

SEQ ID NO: 1319 - protein, 380 aa, Homo sapiens
MARLGAVRSHYCALLLAAALAVCAFYYLGSGRETFSSATKRLKEARAGAPAAPSPPALELARGSVAPAPGAKAKSLEGGGAGPVDYHLLMMFTKAEHNAALQAKARVALRSLLRLAKFEAHEVLNLHFVSEEASREVAKGLLRELLPPAAGFKCKVIFHDVAVLTDKLFPIVEAMQKHFSAGLGTYYSDSIFFLSVAMHQIMPKEILQIIQLDLDLKFKTNIRELFEEFDSFLPGAIIGIAREMQPVYRHTFWQFRHENPQTRVGGPPPEGLPGFNSGVMLLNLEAMRQSPLYSRLLEPAQVQQLADKYHFRGHLGDQDFFTMIGMEHPKLFHVLDCTWNRQLCTWWRDHGYSDVFEAYFRCEGHVKIYHGNCNTPIPED

SEQ ID NO: 1320 - protein, 73 aa, Homo sapiens
LESYSSVRELLVSVRFYVVCKVRGSVLFPYLGKSTAGVEGLYVPFNVTVLKDLSRESESFAECDRRLNNLICF

SEQ ID NO: 1321 - protein, 95 aa, Homo sapiens; identical to SEQ ID NO: 1190

SEQ ID NO: 1322 - protein, 234 aa, Homo sapiens; identical to SEQ ID NO: 1191

SEQ ID NO: 1323 - protein, 15 aa, Homo sapiens
NATKSQPCLSSLLLF

SEQ ID NO: 1324 - protein, 62 aa, Homo sapiens
  SITE (3): Xaa equals any of the naturally occurring L-amino acids
KYXKHPSKSFELTLVLRKLSLHNQPPGKTECHLLKSKCCVIITLQTKWRYYLFCKQQTKQNS

SEQ ID NO: 1325 - protein, 15 aa, Homo sapiens
NATKSQPCLSSLLLF

SEQ ID NO: 1326 - protein, 228 aa, Homo sapiens
  SITE (92): Xaa equals any of the naturally occurring L-amino acids
  SITE (134): Xaa equals any of the naturally occurring L-amino acids
  SITE (170): Xaa equals any of the naturally occurring L-amino acids
  SITE (195): Xaa equals any of the naturally occurring L-amino acids
  SITE (205): Xaa equals any of the naturally occurring L-amino acids
  SITE (209): Xaa equals any of the naturally occurring L-amino acids
  SITE (214): Xaa equals any of the naturally occurring L-amino acids
MVPNWIQGRWDVLLCVLTVGVLPSIGSRGGWFGTQVPCLIPGALASLHRGTALQLSYPFSMAGRTAERPCSMTNHSFHLLSIYWELGTVLSXKRVLTHLLQQPGKAGSSVSPCSKLGDLEHRRSSAWLKAHSSXVQILCPSWHPSLGGSGVGSLQSVPGGWMTKLQPSRXPTISIAQWSQKETDHFTDQRNKGAXLLNPGASDRXKPEXRTKKXPVNSEPGETLPFTN

SEQ ID NO: 1327 - protein, 84 aa, Homo sapiens
DNFLLGVAWFFRGRGSAHVGVVSRQKQWEEGTAKHAAWDYGCPQSCSFSKGVFCLFLRQGHTLSPRMECSGPILAHCNLELLGS

SEQ ID NO: 1328 - protein, 174 aa, Homo sapiens [sequence omitted]

SEQ ID NO: 1329 - protein, 115 aa, Homo sapiens
MVPNWIQGRWDVLLCVLTVGVLPSIGSRGGWFGTQVPCLIPGALASLHRGTALQLSYPFSMAGRTAERPCSMTNHSFHLLSIYWELGTVLSVKRVLTHLLQQPGKAVLPLAPAQS

SEQ ID NO: 1330 - protein, 59 aa, Homo sapiens
  SITE (54): Xaa equals any of the naturally occurring L-amino acids
  SITE (56): Xaa equals any of the naturally occurring L-amino acids
MENQMLTCVAIFVLFCFVLFLRQGLALSPRLECSGMIRAYCSLTLDFLGSSNPXTXAPK

SEQ ID NO: 1331 - protein, 59 aa, Homo sapiens
MENQMLTCVAIFVLFCFVLFLRQGLALSPRLECSGMIRAYCSLTLDFLGSSNPPTSAPK

SEQ ID NO: 1332 - protein, 100 aa, Homo sapiens
GSFLSPWGPILWGLGAGVLMGDALQGREGRMQATVGAGPEGSETVAVQVCVIREAVVGEEVSDCVAPLCGVGGQGGAAKEARKMGGGWDGLGSHIHVLDF

SEQ ID NO: 1333 - protein, 99 aa, Homo sapiens
MLILGSMFSLVEPVLTIAAALSVQSPFTRSAQSSPECAAARRPLESDQGDPFTLFNVFNAWVQVKSERSRNSRKWCRRRGIEEHRLYEMANFGASSRTV

SEQ ID NO: 1334 - protein, 163 aa, Homo sapiens [sequence omitted]

SEQ ID NO: 1335 - protein, 552 aa, Homo sapiens
  SITE (142): Xaa equals any of the naturally occurring L-amino acids
MLILGSMFSLVEPVLTIAAALSVQSPFTRSAQSSPECAAARRPLESDQGDPFTLFNVFNAWVQVKSERSRNSRKWCRRRGIEEHRLYEMANLRRQFKELLEDHGLLAGAQAAQVGDSYSRLQQRRERRALHQLKRQHEEGAXCRRKVLRLQEEQDGGSSDEDRAGPAPPGASDGVDIQDVKFKLRHDLAQLQAAASSAQDLSREQLALLKLVLGRGLYPQLAVPDAFNSSRKDSDQIFHTQAKQGAVLHPTCVFAGSPEVLHAQELEASNCDGSRDDKDKMSSKHQLLSFVSLLETNKPYLVNCVRIPALQSLLLFSRSLDTNGDCSRLVADGWLELQLADSESAIRLLAASLRLRARWESALDRQLAHQAQQQLEEEEEDTPVSPKEVATLSKELLQFTASKIPYSLRRLTGLEVQNMYVGPQTIPATPHLPGLFGSSTLSPHPTKGGYAVTDFLTYNCLTNDTDLYSDCLRTFWTCPHCGLHAPLTPLERIAHENTCPQAPQDGPPGAEEAALETLQKTSVLQRPYHCEACGKDFLFTPTEVLRHRKQHV

SEQ ID NO: 1336 - protein, 78 aa, Homo sapiens
MSLYGTRWRISWPHWRRVVLVSLLSSSGGQISPSLSHHLPCSDFFELETSLALFWLTTLVPSITNITRVFTTLLRTLM

SEQ ID NO: 1337 - protein, 78 aa, Homo sapiens; identical to SEQ ID NO: 1336

SEQ ID NO: 1338 - protein, 159 aa, Homo sapiens
MGCLWGLALPLFFFCWEVGVSGSSAGPSTRRADTAMTTDDTEVPAMTLAPGHAALETQTLSAETSSRASTPAGPIPEAETRGAKRISPARETRSFTKTSPNFMVLIATSVETSAASGSPEGARMTTVQTITGSDPRKPSLTPFAPMTALKRQRHSQWTY

SEQ ID NO: 1339 - protein, 149 aa, Homo sapiens
  SITE (114): Xaa equals any of the naturally occurring L-amino acids
  SITE (123): Xaa equals any of the naturally occurring L-amino acids
  SITE (144): Xaa equals any of the naturally occurring L-amino acids
MGCLWGLALPLFFFCWEVGVSGSSAGPSTRRADTAMTTDDTEVPAMTLAPGHAALETQTLSAETSSRASTPAGPIPEAETRGAKRISPARETRSFTKTSPNFMVLIATSVETSXASGSPEGAXMTTVQTITGSDPREAIFDTLXTDDSS

SEQ ID NO: 1340 - protein, 595 aa, Homo sapiens
MGCLWGLALPLFFFCWEVGVSGSSAGPSTRRADTAMTTDDTEVPAMTLAPGHAALETQTLSAETSSRASTPAGPIPEAETRGAKRISPARETRSFTKTSPNFMVLIATSVETSAASGSPEGARMTTVQTITGSDPREAIFDTLCTDDSSEEAKTLTMDILTLAHTSTEAKGLSSESSASSDGPHPVITPSRASESSASSDGPHPVITPSRASESSASSDGPHPVITPSRASESSASSDGPHPVITPSRASESSASSDGPHPVITPSRASESSASSDGPHPVITPSWSPGSDVTLLAEALVSVTNIEVINCSITEIETTTSSIPGASDTDLIPTEGVKASSTSDPPALPDSTEAKPHITEVTASAETLSTAGTTESAAPDATVGTPLPTNSATEREVTAPGATTLSGALVTVSRNPLEETSALSVETPSYVKVSGAAPVSIEAGSAVGKTTSFAGSSASSYSPSEAALKNFTPSETPTMDIATKGPFPTSRDPLPSVPPTTTNSSRGTNSTLAKITTSAKTTMKPPTATPTTARTRPTTDVSAGENGGFLLLRLSVASPEDLTDPRVAERLMQQLHRELHAHAPHFQVSLLRVRRG

SEQ ID NO: 1341 - protein, 114 aa, Homo sapiens
MWNPWIAMCLLGLSYSLLACALWPMVAFVVPEHQLGTAYGFMQSIQNLGLAIISIIAGMILDSRGYLFLEVFFIACVSLSLLSVVLLYLVNRAQGGNLNYSARQREEIKFSHTE

SEQ ID NO: 1342 - protein, 114 aa, Homo sapiens; identical to SEQ ID NO: 1341

SEQ ID NO: 1343 - protein, 114 aa, Homo sapiens; identical to SEQ ID NO: 1341

SEQ ID NO: 1344 - protein, 465 aa, Homo sapiens
MEEEDEEARALLAGGPDEADRGAPAAPGALPALCDPSRLAHRLLVLLLMCFLGFGSYFCYDNPAALQTQVKRDMQVNTTKFMLLYAWYSWPNVVLCFFGGFLIDRVFGIRWGTIIFSCFVCIGQVVFALGGIFNAFWLMEFGRFVFGIGGESLAVAQNTYAVSWFKGKELNLVFGLQLSMARIGSTVNMNLMGWLYSKIEALLGSAGHTTLGITLMIGGITCILSLICALALAYLDQRAERILHKEQGKTGEVIKLTDVKDFSLPLWLIFIICVCYYVAVFPFIGLGKVFFTEKFGFSSQAASAINSVVYVISAPMSPVFGLLVDKTGKNIIWVLCAVAATLVSHMMLAFTMWNPWIAMCLLGLSYSLLACALWPMVAFVVPEHQLGTAYGFMQSIQNLGLAIISIIAGMILDSRGYLFLEVFFIACVSLSLLSVVLLYLVNRAQGGNLNYSARQREEIKFSHTE

SEQ ID NO: 1345 - protein, 83 aa, Homo sapiens
MGLKALPEPFMSLVSHLLRTFFLVWFVGLPVAILGNLLECYANVFTGNGGGPEPWGGHLVSECLALPQLGIQYLALSGGIIWL

SEQ ID NO: 1346 - protein, 73 aa, Homo sapiens [sequence omitted]

SEQ ID NO: 1347 - protein, 83 aa, Homo sapiens; identical to SEQ ID NO: 1345

SEQ ID NO: 1348 - protein, 111 aa, Homo sapiens
MFLARVPFLFTIVPFSVLRSMLSKVVRSTEQGTLFACIAFLETLGGVTAVSTFNGIYSATVAWYPGFTFLLSAGLLLLPAISLCVVKCTSWNEGSYELLIQEESSEDASDR

SEQ ID NO: 1349 - protein, 111 aa, Homo sapiens; identical to SEQ ID NO: 1348

SEQ ID NO: 1350 - protein, 230 aa, Homo sapiens
MSCSEGFKNLFYRTYMLFKNASGKRRFLLCLLLFTVITYFFVVIGIAPIFILYELDSPLCWNEVFIGYGSALGSASFLTSFLGIWLFSYCMEDIHMAFIGIFTTMTGMAMTAFASTTLMMFLARVPFLFTIVPFSVLRSMLSKVVRSTEQGTLFACIAFLETLGGVTAVSTFNGIYSATVAWYPGFTFLLSAGLLLLPAISLCVVKCTSWNEGSYELLIQEESSEDASDR

SEQ ID NO: 1351 - protein, 137 aa, Homo sapiens
  SITE (111): Xaa equals any of the naturally occurring L-amino acids
  SITE (116): Xaa equals any of the naturally occurring L-amino acids
  SITE (123): Xaa equals any of the naturally occurring L-amino acids
MYLQVETRTSSRLHLKRAPGIRSWSLLVGILSIGLAAAYYSGDSLGWKLFYVTGCLFVAVQNLEDWEEAIFDKSTGKVVLKTFSLYKKLLTLFRAGHDQVVVLLHDVRDVXVEEEXVRYFGKXYMVVLRLATGFFHP

SEQ ID NO: 1352 - protein, 124 aa, Homo sapiens
MYLQVETRTSSRLHLKRAPGIRSWSLLVGILSIGLAAAYYSGDSLGWKLFYVTGCLFVAVQNLEDWEEAIFDKSTGKVVLKTFSLYKKLLTLFRAGHDQVVVLLHDVRSGCQSLVAGQGHHNHK

SEQ ID NO: 1353 - protein, 145 aa, Homo sapiens
  SITE (123): Xaa equals any of the naturally occurring L-amino acids
  SITE (135): Xaa equals any of the naturally occurring L-amino acids
  SITE (137): Xaa equals any of the naturally occurring L-amino acids
MYLQVETRTSSRLHLKRAPGIRSWSLLVGILSIGLAAAYYSGDSLGWKLFYVTGCLFVAVQNLEDWEEAIFDKSTGKVVLKTFSLYKKLLTLFRAGHDQVVVLLHDVRDVSVEEEKVRYFGKXYMVVLRLATGFXHXLTQSADMG

SEQ ID NO: 1354 - protein, 89 aa, Homo sapiens
  SITE (24): Xaa equals any of the naturally occurring L-amino acids
  SITE (75): Xaa equals any of the naturally occurring L-amino acids
MFKDYPPAIKPSYDVLLLLLLLVXLLQAGLNTGTAIQCVRFKVSARLQGASWDTQNGPQERLAGEVARSPLKEFXKEKAWRAVVVQMAQ

SEQ ID NO: 1355 - protein, 89 aa, Homo sapiens
MFKDYPPAIKPSYDVLLLLLLLVLLLQAGLNTGTAIQCVRFKVSARLQGASWDTQNGPQERLAGEVARSPLKEFDKEKAWRAVVVQMAQ

SEQ ID NO: 1356 - protein, 419 aa, Homo sapiens
MNNQKQQKPTLSGQRFKTRKRDEKERFDPTQFQDCIIQGLTETGTDLEAVAKFLDASGAKLDYRRYAETLFDILVAGGMLAPGGTLADDMMRTDVCVFAAQEDLETMQAFAQVFNKLIRRYKYLEKGFEDEVKKLLLFLKGFSESERNKLAMLTGVLLANGTLNASILNSLYNENLVKEGVSAAFAVKLFKSWINEKDINAVAASLRKVSMDNRLMELFPANKQSVEHFTKYFTEAGLKELSEYVRNQQTIGARKELQKELQEQMSRGDPFKDIILYVKEEMKKNNIPEPVVIGIVWSSVMSTVEWNKKEELVAEQAIKHLKQYSPLLAAFTTQGQSELTLLLKIQEYCYDNIHFMKAFQKIVVLFYKAEVLSEEPILKWYKDAHVAKGKSVFLEQMKKFVEWLKNAEEESESEAEEGD

SEQ ID NO: 1357 - protein, 19 aa, Homo sapiens
TIACMLTFCFVLFCFVLHF

SEQ ID NO: 1358 - protein, 857 aa, Homo sapiens
MSYYMADRKHRKAFLEARQSLEVKMNLEEQSQQQENLMLSILPKHVADEMLKDMKKDESQKDQQQFNTMYMYRHENVSILFADIVGFTQLSSACSAQELVKLLNELFARFDKLAAKYHQLRIKILGDCYYCICGLPDYREDHAVCSILMGLAMVEAISYVREKTKTGVDMRVGVHTGTVLGGVLGQKRWQYDVWSTDVTVANKMEAGGIPGRVHISQSTMDCLKGEFDVEPGDGGSRCDYLEEKGIETYLIIASKPEVKKTATQNGLNGSALPNGAPASSKSSSPALIETKEPNGSAHSSGSTSEKPEEQDAQADNPSFPNPRRRLRLQDLADRVVDASEDEHELNQLLNEALLERESAQVVKKRNTFLLSMRFMDPEMETRYSVEKEKQSGAAFSCSCVVLLCTALVEILIDPWLMTNYVTFMVGEILLLILTICSLAAIFPRAFPKKLVAFSTWIDRTRWARNTWAMLAIFILVMANVVDMVSHMVKLTLMLLVAGAVATINLYAWRPVFDEYDHKRFREHDLPMVALEQMQGFNPGLNGTDRLPLVPSKYSMTVMVFLMMLSFYYFSRHVEKLARTLFLWKIEVHDQKERVYEMRRWNEALVTNMLPEHVARHFLGSKKRDEELYSQTYDEIGVMFASLPNFADFYTEESINNGGIECLRFLNEIISDFDSLLDNPKFRVITKIKTIGSTYMAASGVTPDVNTNGFASSNKEDKSERERWQHLADLADFALAMKDTLTNINNQSFNNFMLRIGMNKGGVLAGVIGARKPHYDIWGNTVNVASRMESTGVMGNIQVVEETQVILREYGFRFVRRGPIFVKGKGELLTFFLKGRDKLATFPNGPSVTLPHQVVDNS

SEQ ID NO: 1359 - protein, 188 aa, Homo sapiens
MVPGAAGWCCLVLWLPACVAAHGFRIHDYLYFQVLSPGDIRYIFTATPAKDFGGIFHTRYEQIHLVPAEPPEACGELSNGFFIQDQIALVERGGCSFLSKTRVVQEHGGRAVIISDNAVDNDSFYVEMIQDSTQRTADIPALFLLGRDGYMIRRSLEQHGLPWAIISIPVNVTSIPTFELLQPPWTFW

SEQ ID NO: 1360 - protein, 188 aa, Homo sapiens; identical to SEQ ID NO: 1359

SEQ ID NO: 1361 - protein, 116 aa, Homo sapiens
  SITE (28): Xaa equals any of the naturally occurring L-amino acids
  SITE (90): Xaa equals any of the naturally occurring L-amino acids
MRKIHTPLFNLLQVRLGFVYFPCFTFPXVQAVVETGTQGLCVAPCSSCLQEACGALVSLASCPPFLLPPLTLPPTLSLRTSSWKGLARAXVLASLWGGRLCGLKGCRLKLQGVGAW

SEQ ID NO: 1362 - protein, 167 aa, Homo sapiens [sequence omitted]

SEQ ID NO: 1363 - protein, 286 aa, Homo sapiens
  SITE (204): Xaa equals any of the naturally occurring L-amino acids
  SITE (224): Xaa equals any of the naturally occurring L-amino acids
  SITE (228): Xaa equals any of the naturally occurring L-amino acids
  SITE (264): Xaa equals any of the naturally occurring L-amino acids
  SITE (271): Xaa equals any of the naturally occurring L-amino acids
MYLSALQSLIPSLFALVLQNAPFSSKAKLHGEVPQIEVTRFPRPMSPLQDVSTIIGSREQLAVLLQLYDYQLEQEGTTGWESLLWVVNQLLPQLIEIVGKINVTSTACVHEFSRFFWRLCRTFGKIFTNTKVKPQFQEILRLSEENIDSSAGNGVLTKATVPIYATGVLTCYIQEEDRKLLVGFLEDVMTLLSLSHAPLDSLKXSFVELGANQAYHELLLTVLXYGVXHTSALVRCTAARMFELLVKGVNETLVAQRVVPALHXLSPVDPXNLCQDCHNFQPLGLF

SEQ ID NO: 1364 - protein, 283 aa, Homo sapiens
MYLSALQSLIPSLFALVLQNAPFSSKAKLHGEVPQIEVTRFPRPMSPLQDVSTIIGSREQLAVLLQLYDYQLEQEGTTGWESLLWVVNQLLPQLIEIVGKINVTSTACVHEFSRFFWRLCRTFGKIFTNTKVKPQFQEILRLSEENIDSSAGNGVLTKATVPIYATGVLTCYIQEEDRKLLVGFLEDVMTLLSLSHAPLDSLKASFVELGANPAYHELLLTVLWYGVVHTSALVRCTAARMFEVCQHMPLLVSIIMIFFFLRRRREFFLIKRLCISKKKKKKK

SEQ ID NO: 1365 - protein, 379 aa, Homo sapiens
  SITE (283): Xaa equals any of the naturally occurring L-amino acids
  SITE (303): Xaa equals any of the naturally occurring L-amino acids
  SITE (307): Xaa equals any of the naturally occurring L-amino acids
MGYIDDPDKYHQGFELLLSALGDPSERVVSATHQVFLPAYAAWTTELGNLQSHLILTLLNKIEKLLREGEHGLDEHKLHMYLSALQSLIPSLFALVLQNAPFSSKAKLHGEVPQIEVTRFPRPMSPLQDVSTIIGSREQLAVLLQLYDYQLEQEGTTGWESLLWVVNQLLPQLIEIVGKINVTSTACVHEFSRFFWRLCRTFGKIFTNTKVKPQFQEILRLSEENIDSSAGNGVLTKATVPIYATGVLTCYIQEEDRKLLVGFLEDVMTLLSLSHAPLDSLKXSFVELGANQAYHELLLTVLXYGVXHTSALVRCTAARMFELLVKGVNETLVAQRVVPALITLSSDPEISVRIATIPAFGTIMETVIQRELLERVKMQ

SEQ ID NO: 1366 - protein, 156 aa, Homo sapiens
MPALLPVASRLLLLPRVLLTMASGSPPTQPSPASDSGSGYVPGSVSAAFVTCPNEKVAKEIARAVVEKRLAACVNLIPQITSIYEWKGKIEEDSEVLMMIKTQSSLVPALTDFVRSVHPYEVAEVIALPVEQGNFPYLQWVRQVTESVSDSITVLP

SEQ ID NO: 1367 - protein, 156 aa, Homo sapiens; identical to SEQ ID NO: 1366

SEQ ID NO: 1368 - protein, 442 aa, Homo sapiens
  SITE (164): Xaa equals any of the naturally occurring L-amino acids
  SITE (247): Xaa equals any of the naturally occurring L-amino acids
MWRLPGLLGRALPRTLGPSLWRVTPKSTSPDGPQTTSSTLLVPVPNLDRSGPHGPGTSGGPRSHGWKDAFQWMSSRVSPNTLWDAISWGTLAVLALQLARQIHFQASLPAGPQRVEHCSWHSPLDRFFSSPLWHPCSSLRQHILPSPDGPAPRHTGLREPRLGXEEASAQPRNFSHNSLRGARPQDPSEEGPGDFGFLHASSSIESEAKPAQPQPTGEKEQDKSKTLSLEEAVTSIQQLFQLSVSIXFNFLGTENMKSGDHTAAFSYFQKAAARGYSKAQYNAGLCHEHGRGTPRDISKAVLYYQLAASQGHSLAQYRYARCLLRDPASSWNPERQRAVSLLKQAADSGLREAQAFLGVLFTKEPYLDEQRAVKYLWLAANNGDSQSRYHLGICYEKGLGVQRNLGEALRCYQQSAALGNEAAQERLRALFSMGAAAGGPAT

SEQ ID NO: 1369 - protein, 84 aa, Homo sapiens
MGLRLPPPLCWFLCLTSTGQVPMAQARAGVQGPMDGRMPSNGCLPVSPRTPYGMPYLGALWPCWPCSWQGRSTSRHPCQQDLSG

SEQ ID NO: 1370 - protein, 129 aa, Homo sapiens [sequence omitted]

SEQ ID NO: 1371 - protein, 53 aa, Homo sapiens
  SITE (1): Xaa equals any of the naturally occurring L-amino acids
  SITE (2): Xaa equals any of the naturally occurring L-amino acids
  SITE (52): Xaa equals any of the naturally occurring L-amino acids
  SITE (53): Xaa equals any of the naturally occurring L-amino acids
XXDTQGRVRGRHEEWGGRRWRKEGSEQRAPGMAWKRLSPWILWVGASGLTSXX

SEQ ID NO: 1372 - protein, 129 aa, Homo sapiens [sequence omitted]

SEQ ID NO: 1373 - protein, 117 aa, Homo sapiens
  SITE (114): Xaa equals any of the naturally occurring L-amino acids
MGFLFLLGLYISSLASCMGGLYGAPRILQCIAQEKVIPALACLGQGKGPNKTPVAAICLTSLVTMAFVFVGQVNVLAPIVTINFMLTYVAVDYSYFSLSMCSCSLTPVPEPVLXEGA

SEQ ID NO: 1374 - protein, 98 aa, Homo sapiens
  SITE (85): Xaa equals any of the naturally occurring L-amino acids
  SITE (90): Xaa equals any of the naturally occurring L-amino acids
  SITE (97): Xaa equals any of the naturally occurring L-amino acids
QGTPRLCTTRLLVQRATISVCFIFYCIIYSKINNTLTCFHTQKIYRVKSLPPILILHLLSSCLPWPRGNHYSHPYIQHFFMDIQXNGNVXSHISLFXP

SEQ ID NO: 1375 - protein, 407 aa, Homo sapiens
  SITE (114): Xaa equals any of the naturally occurring L-amino acids
MGFLFLLGLYISSLASCMGGLYGAPRILQCIAQEKVIPALACLGQGKGPNKTPVAAICLTSLVTMAFVFVGQVNVLAPIVTINFMLTYVAVDYSYFSLSMCSCSLTPVPEPVLXEGAEGLHCSEHLLLEKAPSYGSEGPAQRVLEGTLLEFTKDMDQLLQLTRKLESSQPRQGEGNRTPESQKRKSKKATKQTLQDSFLLDLKSPPSFPVEISDRLPAASWEGQESCWNKQTSKSEGTQPEGTYGEQLVPELCNQSESSGEDFFLKSRLQEQDVWRRSTSFYTHMCNPWVSLLGAVGSLLIMFVIQWVYTLVNMGVAAIVYFYIGRASPGLHLGSASNFSFFRWMRSLLLPSCRSLQSPQEQIILAPSLAKVDMEMTQLTQENADFATRDRYHHSSLVNREQLMPHY

SEQ ID NO: 1376 - protein, 137 aa, Homo sapiens
MLSGRLVLGLVSMAGRVCLCQGSAGSGAIGPVEAAIRTKLEEALSPEVLELRNESGGHAVPPGSETHFRVAVVSSRFEGLSPLQRHRLVHAALAEELGGPVHALAIQARTPAQWRENSQLDTSPPCLGGNKKTLGTP

SEQ ID NO: 1377 - protein, 143 aa, Homo sapiens
  SITE (19): Xaa equals any of the naturally occurring L-amino acids
  SITE (47): Xaa equals any of the naturally occurring L-amino acids
  SITE (58): Xaa equals any of the naturally occurring L-amino acids
  SITE (104): Xaa equals any of the naturally occurring L-amino acids
FGPAVFGFGSPRGKPPGNXRGGPIRVPGFGRPRPISAPEVWEGRPLXAPRSCFRNFRXRRSGGHAVPPGSETHFRVAVVSSRFEGLSPLQRHRLVHAALAEELXGPVHALAIQARTPAQWRENSQLDTSPPCLGGNKKTLGTP

SEQ ID NO: 1378 - protein, 137 aa, Homo sapiens; identical to SEQ ID NO: 1376

SEQ ID NO: 1379 - protein, 82 aa, Homo sapiens
  SITE (17): Xaa equals any of the naturally occurring L-amino acids
MIRRLVFAAFPRLFPVXLPSMLTHWASLAVIPTMTATSVGKAPPGPLPDASPSLRLPARRRPDPVGACRGVRGMADLMVPLP

SEQ ID NO: 1380 - protein, 254 aa, Homo sapiens
  SITE (176): Xaa equals any of the naturally occurring L-amino acids
  SITE (210): Xaa equals any of the naturally occurring L-amino acids
  SITE (214): Xaa equals any of the naturally occurring L-amino acids
  SITE (237): Xaa equals any of the naturally occurring L-amino acids
  SITE (246): Xaa equals any of the naturally occurring L-amino acids
EFGTSLKVRGFILEVSETTNPPEGTNSGHSGMVSALCGLCLLGSNDSPASASQVAGTTGLSKSLGLIEGYGGRGKGGLPATLSPAEEEKAKGPHEKYGYNSYLSEKISLDRSIPDYRPTKCKELKYSKDLPQISIIFIFVNEALSVILRSVHSAVNHTPTHLLKEIILVDDNSDEXELKVPLEEYVHKRYPGLVKVVRNQKRESLIRARXEGWXVATGQVTGFFDAPRGIHRLLGLXRVYPDPGKXRKRGNLPL

SEQ ID NO: 1381 - protein, 74 aa, Homo sapiens [sequence omitted]

SEQ ID NO: 1382 - protein, 273 aa, Homo sapiens
MVSALCGLCLLGSNDSPASASQVAGTTGLSKSLGLIEGYGGRGKGGLPATLSPAEEEKAKGPHEKYGYNSYLSEKISLDRSIPDYRPTKCKELKYSKDLPQISIIFIFVNEALSVILRSVHSAVNHTPTHLLKEIILVDDNSDEEELKVPLEEYVHKRYPGLVKVVRNQKREGLIRARIEGWKVATGQVTGFFDAHVEFTAGWAEPVLSRIQENRKRVILPSIDNIKQDNFEVQRYENSAHGYSWELWCMYISPPKDWWDAGDPSLPISDRFS

SEQ ID NO: 1383 - protein, 238 aa, Homo sapiens
MQQGPKEFIECVSHIRLLSWLLLGSLTHNAVCPNASSPCLPIPLDAGSHVADHLIVILIGFPEQSKTSVLHMCSLFHAFIFAQLWTVYCEQSAVATNLQNQNEFSFTAILTALEFWSRVTPSILQLMAHNKVMVEMVCLHVISLMEALQECNSTIFVKLIPMWLPMIQSNIKHLSAGLQLRLQAIQNHVNHHSLRTLPGSGQSSAGLAALRKWLQCTQFKMAQVEIQSSEAASQFYPL

SEQ ID NO: 1384 - protein, 227 aa, Homo sapiens
HELKVGLAQIAAMDISRGNHRDNKAVIRYLPWLYHPPSAMQQGPKEFIECVSHIRLLSWLLLGSLTHNAVCPNASSPCLPIPLDAGSHVADHLIVILIGFPEQSKTSVLHMCSLFHAFIFAQLWTVYCEQSAVATNLQNQNEFSFTAILTALEFWSRVTPSILQLMAHNKVMVEMVCLHVISLMEALQECNSTIFVKLIPMWLPMIQSNIKHLSAGLQFASRLFRTT

SEQ ID NO: 1385 - protein, 85 aa, Homo sapiens
MSTCCTSALQYLLALFPLPAPNCVSYRSQGSSCYLLLQIQKPRLREEPEWPQPQSKSMRGSMKLGFFPHCTRLLPSWGGGGRCSG

SEQ ID NO: 1386 - protein, 110 aa, Homo sapiens
  SITE (20): Xaa equals any of the naturally occurring L-amino acids
LLGCTKIGGRSDLAGPWVRXRSLEPTCVGMNPGSAGCPLVSGSTSLCFRVLIYKMGMMMMILWGCNMVQSHWKSLAVPQKVKHKSYHMIQVWQHIPVVPATQEDHLSPGV

SEQ ID NO: 1387 - protein, 85 aa, Homo sapiens; identical to SEQ ID NO: 1385

SEQ ID NO: 1388 - protein, 261 aa, Homo sapiens [sequence omitted]

SEQ ID NO: 1389 - protein, 72 aa, Homo sapiens
IVNPMFCNFHFRSLTYFFLSHKNTFVLIVGEIFSAFCMFFLIFVGLNILVVITVIIQQKAYPFKNFSTMSFF

SEQ ID NO: 1390 - protein, 261 aa, Homo sapiens [sequence omitted]

SEQ ID NO: 1391 - protein, 98 aa, Homo sapiens
MHLHVSVSLIWGLLSFLSLQVCVFVGSSQPLLLQCVSGPAPFLLSLGVRHQPFWDCPTGPSREETRLNPRALTRPRQTCWSFGWQVALRPSEKSPCFS

SEQ ID NO: 1392 - protein, 98 aa, Homo sapiens; identical to SEQ ID NO: 1391

SEQ ID NO: 1393 - protein, 139 aa, Homo sapiens
  SITE (14): Xaa equals any of the naturally occurring L-amino acids
  SITE (116): Xaa equals any of the naturally occurring L-amino acids
  SITE (139): Xaa equals any of the naturally occurring L-amino acids
MALYELFSHPVERXYRAGLCSKAALFLLLAAALTYIPPLLVAFRSHGFWLKRTATRSSRPCASNTRCCSWPCSDPKATGSSPGARSPPSTGCKGIACASRSFRGGDNACCVKQDSXSLCIYRSDVDSSQNSLVTKGAGX

SEQ ID NO: 1394 - protein, 316 aa, Homo sapiens
MALYELFSHPVERSYRAGLCSKAALFLLLAAALTYIPPLLVAFRSHGFWLKRSSYEEQPTVRFQHQVLLVALLGPESDGFLAWSTFPAFNRLQGDRLRVPLVSTREEDRNQDGKTDMLHFKLELPLQSTEHVLGVQLILTFSYRLHRMATLVMQSMAFLQSSFPVPGSQLYVNGDLRLQQKQPLSCGGLDARYNISVINGTSPFAYDYDLTHIVAAYQERNVTTVLNDPNPIWLVGRAADAPFVINAIIRYPVEVISYQPGFWEMVKFAWVQYVSILLIFLWVFERIKIFVFQNQVVTTIPVTVTPRGDLCKEHLS

SEQ ID NO: 1395 - protein, 103 aa, Homo sapiens
  SITE (77): Xaa equals any of the naturally occurring L-amino acids
MAFLLERSGTLLICSMWWHHGYSNITGTEGERRNLKRNKTNFRRFQDGRIGTAPVYSSQCERCRRWVISAFPTEQTXHQKIISHAWLGGSHAHGASLIASTAV

SEQ ID NO: 1396 - protein, 103 aa, Homo sapiens
MAFLLERSGTLLICSMWWHHGYSNITGTEGERRNLKRNKTNFRRFQDGRIGTAPVYSSQCERCRRWVISAFPTEQTAHQKIISHAWLGGSHAHGASLIASTAV

SEQ ID NO: 1397 - protein, 125 aa, Homo sapiens
MCVWFCLFACLFACLFFETESHSVAQAGVQWLDLSSLQQPPPPGFKCFSCLCLLSSWDYRRACHHTRIIFVFLVEMGFHHVDQADLELLTSSDPPALASRSAGITGVSHHTPPACLVFKFLFLGS

SEQ ID NO: 1398 - protein, 112 aa, Homo sapiens
  SITE (91): Xaa equals any of the naturally occurring L-amino acids
  SITE (106): Xaa equals any of the naturally occurring L-amino acids
APVLLLPSSCWQFWVLGFFFFRQSLTPSPGWKYSGAVSAHCSLRLPGSNDPLASASQLAGTTGAHHHGQLIFVFLVEMGFHHIAQAGLKLXTSSDLLTSAFQSAGXIYILNK

SEQ ID NO: 1399 - protein, 125 aa, Homo sapiens [sequence omitted]

SEQ ID NO: 1400 - protein, 79 aa, Homo sapiens [sequence omitted]

SEQ ID NO: 1401 - protein, 455 aa, Homo sapiens
  SITE (1): Xaa equals any of the naturally occurring L-amino acids
  SITE (17): Xaa equals any of the naturally occurring L-amino acids
  SITE (103): Xaa equals any of the naturally occurring L-amino acids
  SITE (178): Xaa equals any of the naturally occurring L-amino acids
XTGQRCENLLEERNCSXPGGPVNGYQKITGGPGLINGRHAKIGTVVSFFCNNSYVLSGNEKRTCQQNGEWSGKQPICIKACREPKISDLVRRRVLPMQVQSRXTPLHQLYSAAFSKQKLQSAPTKKPALPFGDLPMGYQHLHTQLQYECISPFYRRLGSSRRTCLRTGKWSGRAPSCXPICGKIENITAPKTQGLRWPWQAAIYRRTSGVHDGSLHKGAWFLVCSGALVNERTVVVAAHCVTDLGKVTMIKTADLKVVLGKFYRDDDRDEKTIQSLQISAIILHPNYDPILLDADIAILKLLDKARISTRVQPICLAASRDLSTSFQESHITVAGWNVLADVRSPGFKNDTLRSGVVSVVDSLLCEEQHEDHGIPVSVTDNMFCASWEPTAPSDICTAETGGIAAVSFPGRASPEPRWHLMGLVSWSYDKTCSHRLSTAFTKVLPFKDWIERNMK

SEQ ID NO: 1402 - protein, 323 aa, Homo sapiens
  SITE (283): Xaa equals any of the naturally occurring L-amino acids
  SITE (296): Xaa equals any of the naturally occurring L-amino acids
  SITE (298): Xaa equals any of the naturally occurring L-amino acids
MELGCWTQLGLTFLQLLLISSLPREYTVINEACPGAEWNIMCRECCEYDQIECVCPGKREVVGYTIPCCRNEENECDSCLIHPGCTIFENCKSCRNGSWGGTLDDFYVKGFYCAECRAGWYGGDCMRCGQVLRAPKGQILLESYPLNAHCEWTIHAKPGFVIQLRFVMLSLEFDYMCQYDYVEVRDGDNRDGQIIKRVCGNERPAPIQSIGSSLHVLFHSDGSKNFDGFHAIYEEITACSSSPCFHDGTCVLDKAGSYKCACLAGYTGQRCENLLEAGKSKIXASEDSLSVLEERXCXDPGGPVNGYQKITGGPGLINGRHAK

SEQ ID NO: 1403 - protein, 80 aa, Homo sapiens [sequence omitted]

SEQ ID NO: 1404 - protein, 121 aa, Homo sapiens
  SITE (114): Xaa equals any of the naturally occurring L-amino acids
KLRLREVKSIAQGHVARIWQSHDSDPGLLILIPVSFLAYHVASKDCSSLFTRKLFLPNLHLHLTPSFLKHYVCVFISIIFIVFGIHVLVCVWKKNLFYQLALGPTWKKKSLNVXAMYSLKM

SEQ ID NO: 1405 - protein, 80 aa, Homo sapiens [sequence omitted]

SEQ ID NO: 1406 - protein, 83 aa, Homo sapiens
  SITE (82): Xaa equals any of the naturally occurring L-amino acids
IWMHFISFLYPIALATTSSTVLNRSGECGHPCLVPVLRENAFSLSPFGMMFAVGLSYMAFFTLRYVPSVPILLRVFIIQECXF

SEQ ID NO: 1407 - protein, 94 aa, Homo sapiens
MHFISFLYPIALATTSSTVLNRSGECGHPCLVPVLRENAFSLSPFGMMFAVGLSYMAFFTLRYVPSVPILLRVFIIQECWILSNAFSASGEMII

SEQ ID NO: 1408 - protein, 94 aa, Homo sapiens; identical to SEQ ID NO: 1407

SEQ ID NO: 1409 - protein, 95 aa, Homo sapiens
MILIRKLFLRRCHWGGWLLPPARASCSGKHSLSHSCRGPRVQRPPHPRFWAGTLAPGPCPGLWCLPGLVQVDVLAAGRCDHLSCLPPLCPQAFLL

SEQ ID NO: 1410 - protein, 92 aa, Homo sapiens
MPGCVFCFLTLLFHSLSVGQYCCLICVCFVLYVYTQIHTRIHIHTHKHFFFPWRQGIALSPRLEYSSAIMTHRLIAALASQAQAILPPQPSE

SEQ ID NO: 1411 - protein, 225 aa, Homo sapiens
  SITE (66): Xaa equals any of the naturally occurring L-amino acids
  SITE (101): Xaa equals any of the naturally occurring L-amino acids
MIHVRHCTPIPALLVCCGATAVIMLVGDTYTLINYVSFINYLCYGVTILGLLLLRWRRPALHRPIXVNLLIPVAYLVFWAFLLVFSFISEPMVCGVGVIIXLTGVPIFFLGVFWRSKPKCVHRLTESMTHWGQELCFVVYPQDAPEEEENAPAHPPCCLPQTSPRSHNEIFVETEAVVSVYMLFIEEVFWQKSFVLFFSGKKRKKIRLSEACFKEALKCGLGFLS

SEQ ID NO: 1412 - protein, 172 aa, Homo sapiens
MIHVRHCTPIPALLVCCGATAVIMLVGDTYTLINYVSFINYLCYGVTILGLLLLRWRRPALHRPIKVNLLIPVAYLVFWAFLLVFSFISEPMVCGVGVIIILTGVPIFFLGVFWRSKPKCVHRLTESMTHWGQELCFVVYPQDAPEEEEEWPLPTLPAACHRQALEATMRFL

SEQ ID NO: 1413 - protein, 225 aa, Homo sapiens; identical to SEQ ID NO: 1411
  SITE (66): Xaa equals any of the naturally occurring L-amino acids
  SITE (101): Xaa equals any of the naturally occurring L-amino acids

SEQ ID NO: 1414 - protein, 67 aa, Homo sapiens
  SITE (12): Xaa equals any of the naturally occurring L-amino acids
KDKCILLKRQSXTHEEQCKLKPNQRLGVAAMPVIPALWEAEVGRLLEIRSLSLGNIVKPCLYKKYKN

SEQ ID NO: 1415 - protein, 587 aa, Homo sapiens; identical to SEQ ID NO: 346

SEQ ID NO: 1416 - protein, 157 aa, Homo sapiens
MRPRGLPPLLVVLLGCWASVSAQTDATPAVTTEGLNSTEAALATFGTFPSTRPPGTPRAPGPSSGPRPTPVTDVAVLCVCDLSPAQCDINCCCDPDCSSVDFSVFSACSVPVVTGDSQFCSQKAVIYSLNFTANPPQRVFELVDQINPSIFCIHITN

SEQ ID NO: 1417 - protein, 587 aa, Homo sapiens; identical to SEQ ID NO: 346

SEQ ID NO: 1418 - protein, 137 aa, Homo sapiens
  SITE (52): Xaa equals any of the naturally occurring L-amino acids
  SITE (117): Xaa equals any of the naturally occurring L-amino acids
  SITE (133): Xaa equals any of the naturally occurring L-amino acids
  SITE (137): Xaa equals any of the naturally occurring L-amino acids
MVEEPGRFLPLWLHILLITVLLVLSGIFSGLNLGLMALDPMELRIVQNCGTXKERRYARKIEPIRRKGNYLLCSLLLGNVLVNTSLTILLDNLIGSGLMAVASFTIGICHLWGDPTXGPCAPRHGAWLVGCQXPCFX

SEQ ID NO: 1419 - protein, 157 aa, Homo sapiens
  SITE (90): Xaa equals any of the naturally occurring L-amino acids
LKPFSQTPYFESPSFSPSWGWRQEDMWEATEAGSLCPLLCGWQGSPGLIHPLMEPQERRAPPKGMQLAAPLSHTCDPSVRGHPALAEVSXTVLRALPSCEFLPWRLFPGAESGPAAKLQASQGWGGCGTKVHVGPSTGCSRSWVPRAWQVKLCRPSA

SEQ ID NO: 1420 - protein, 631 aa, Homo sapiens [sequence omitted]

SEQ ID NO: 1421 - protein, 83 aa, Homo sapiens
MGVRVWELPAQPTGLHLLCFCTRTMLLALKLPKTKHSFPDPYTSILSFIHPAFTENLTLCQVSVFLSSSNTEMNQMFHGVSFR

SEQ ID NO: 1422 - protein, 103 aa, Homo sapiens
  SITE (86): Xaa equals any of the naturally occurring L-amino acids
  SITE (87): Xaa equals any of the naturally occurring L-amino acids
  SITE (93): Xaa equals any of the naturally occurring L-amino acids
  SITE (94): Xaa equals any of the naturally occurring L-amino acids
  SITE (96): Xaa equals any of the naturally occurring L-amino acids
MMASIQSFSAMALLFYTVFMFVIVLSSLKHGLFSGQWLRRVSYVRWEGVFRCIPIFGMSFACQSQVLPTYDSLDEPSVKTMSSIFXXSLNVVXXFXVMVGVFR

SEQ ID NO: 1423 - protein, 384 aa, Homo sapiens
  SITE (96): Xaa equals any of the naturally occurring L-amino acids
  SITE (131): Xaa equals any of the naturally occurring L-amino acids
QRQEDEEDKPRQVEVHQEPGAAVPRGQEAPEGKARETVENLPPLPLDPVLRAPGGRPAPSQDLNQRSLEHSEGPVGRDPAGPPDGGPDTEPRAAQXKLRDGQKDAAPRAAGTVKELPKGPEQVPVPDPARXAGGPEERLAEEFPGQSQDVTGGSQDRKKPGKEVAATGTSILKEANWLVAGPGAETGDPRMKPKQVSRDLGLAADLPGGAEGAAAQPQAVLRQPELRVISDGEQGGQQGHRLDHGGHLEMRKARGGDHVPVSHEQPRGGEDAAVQEPRQRPEPELGLKRAVPGGQRPDNAKPNRDLKLQAGSDLRRRRRDLGPHAEGQLAPRDGVIIGLNPLPDVQVNDLRGALDAQLRQAAGGALQVVHSRQLRQAPGPPEES

SEQ ID NO: 1424 - protein, 973 aa, Homo sapiens
MMASIQSFSAMALLFYTVFMFVIVLSSLKHGLFSGQWLRRVSYVRWEGVFRCIPIFGMSFACQSQVLPTYDSLDEPSVKTMSSIFASSLNVVTTFYVMVGFFGYVSFTEATAGNVLMHFPSNLVTEMLRVGFMMSVAVGFPMMILPCRQALSTLLCEQQQKDGTFAAGGYMPPLRFKALTLSVVFGTMVGGILIPNVETILGLTGATMGSLICFICPALIYKKIHKNALSSQVVLWVGLGVLVVSTVTTLSVSEEVPEDLAEEAPGGRLGEAEGLMKVEAARLSAQDPVVAVAEDGREKPKLPKEREELEQAQIKGPVDVPGREDGKEAPEEAQLDRPGQGIAVPVGEAHRHEPPVPHDKVVVDEGQDREVPEENKPPSRHAGGKAPGVQGQMAPPLPDSEREKQEPEQGEVGKRPGQAQALEEAGDLPEDPQKVPEADGQPAVQPAKEDLGPGDRGLHPRPQAVLSEQQNGLAVGGGEKAKGGPPPGNAAGDTGQPAEDSDHGGKPPLPAEKPAPGPGLPPEPREQRDVERAGGNQAASQLEEAGRAEMLDHAVLLQVIKEQQVQQKRLLDQQEKLLAVIEEQHKEIHQQRQEDEEDKPRQVEVHQEPGAAVPRGQEAPEGKARETVENLPPLPLDPVLRAPGGRPAPSQDLNQRSLEHSEGPVGRDPAGPPDGGPDTEPRAAQGKLRDGQKDAAPRAAGTVKELPKGPEQVPVPDPAREAGGPEERLAEEFPGQSQDVTGGSQDRKKPGKEVAATGTSILKEANWLVAGPGAETGDPRMKPKQVSRDLGLAADLPGGAEGAAAQPQAVLRQPELRVISDGEQGGQQGHRLDHGGHLEMRKARGGDHVPVSHEQPRGGEDAAVQEPRQRPEPELGLKRAVPGGQRPDNAKPNRDLKLQAGSDLRRRRRDLGPHAEGQLAPRDGVIGLNPLPDVQVNDLRGALDAQLRQAAGGALQVVHSRQLRQAPGPPEES

SEQ ID NO: 1425 - protein, 110 aa, Homo sapiens
  SITE (89): Xaa equals any of the naturally occurring L-amino acids
  SITE (96): Xaa equals any of the naturally occurring L-amino acids
  SITE (104): Xaa equals any of the naturally occurring L-amino acids
MYLQIPVKHMLHSGYQATFFSPKIGCSSILVFVCLLVFLRQSLALLPRLEYSGAILAHCNLHLLGSSDSPASASPVAGITGMHHHTQLXFCTFSRXGIYQLASXSPNPDL

SEQ ID NO: 1426 - protein, 57 aa, Homo sapiens
FNTPKIFFGTYHRQGTLISTGDTISCLGLLCSSAAREGIAICRILKKHKHKGAKLYI

SEQ ID NO: 1427 - protein, 127 aa, Homo sapiens
MLHSGYQATFFSPKIGCSSILVFVCLLVFLRQSLALLPRLEYSGAILAHCNLHLLGSSDSPASASPVAGITGMHHHTQLFFCTFSRDGILPCWPGWSPTPDLRQSTLLSLPKCWDYRHEPLRPAQAF

SEQ ID NO: 1428 - protein, 80 aa, Homo sapiens [sequence omitted]

SEQ ID NO: 1429 - protein, 73 aa, Homo sapiens
  SITE (38): Xaa equals any of the naturally occurring L-amino acids
HFSFWFIHFPHFHLKILTKCLAEFSKYNNFTLPADNEXIRVQNPFQLSKHLLSLYFVSDTGVKFWKCKRNLHL

SEQ ID NO: 1430 - protein, 80 aa, Homo sapiens [sequence omitted]

SEQ ID NO: 1431 - protein, 26 aa, Homo sapiens
MLRWHLWSWFCWFCLSEAGVLLDLPT

SEQ ID NO: 1432 - protein, 84 aa, Homo sapiens
  SITE (1): Xaa equals any of the naturally occurring L-amino acids
  SITE (25): Xaa equals any of the naturally occurring L-amino acids
  SITE (42): Xaa equals any of the naturally occurring L-amino acids
  SITE (64): Xaa equals any of the naturally occurring L-amino acids
  SITE (79): Xaa equals any of the naturally occurring L-amino acids
XMSRQHRLNPHGPDPAAPHRACRLXSPRQVTWLTPAEALPLXPCPSQCGAHCRQHGPEREGSAXPAALLRPGLPVFGHXLRLSQ

SEQ ID NO: 1433 - protein, 26 aa, Homo sapiens
MLRWHLWSWFCWFCLSEAGVLLDLPT

SEQ ID NO: 1434 - protein, 139 aa, Homo sapiens
MALRMLWAGQAKGILGGWGIICLVMSLLLQHPGVYSKCYFQAQAPCHYEGKYFTLGESWLRKDCFHCTCLHPVGVGCCDTSQHPIDFPAGCEVRQEAGTCQFSLVQKSDPRLPCKGGGPDPEWGSANTPVPGAPAPHSS

SEQ ID NO: 1435 - protein, 139 aa, Homo sapiens; identical to SEQ ID NO: 1434

SEQ ID NO: 1436 - protein, 80 aa, Homo sapiens
MFDRCRVTSCSCTCGAGAKWCTHVVALCLFRIHNASAVCLRAPVSESLSRLQRDQLQKFAQYLISELPQQVGEVGTPSCN

SEQ ID NO: 1437 - protein, 145 aa, Homo sapiens
DPSGSFMGRSVMMRILGSPVFFPMHDTSVCLTYPNFYTVVSPTGSRPPSRNWNSETPGDEELGFEAAVAALGMKTTVSEAEHPLLCEGTRREKGDLALALMITYKDDQAKLKKKISRAWWRAPVVPATREAEVGELLEPRSLRLQ

SEQ ID NO: 1438 - protein, 80 aa, Homo sapiens; identical to SEQ ID NO: 1436

SEQ ID NO: 1439 - protein, 91 aa, Homo sapiens
  SITE (56): Xaa equals any of the naturally occurring L-amino acids
MASQVPSSPFQSFFVFVFVFLRPSHSVAQAGVPLHFYFFIQQVLIKCALYQVLSSXLGYNGDQGDCRFWQGKLTSNTATRHSETLSLLEEL

SEQ ID NO: 1440 - protein, 137 aa, Homo sapiens
  SITE (132): Xaa equals any of the naturally occurring L-amino acids
MSAKQVTSQSSLSENDGFQAFVWWLLGIGALTFALLMSARMGIFQETLYKRFGKHSKEALFYNHALPLPGFVFLASDIYDHAVLFNKSELYEIPVIGVTLPIMWFYLLMNIITQYVCIRGVFILTTGMRLPXRHARS

SEQ ID NO: 1441 - protein, 94 aa, Homo sapiens
  SITE (6): Xaa equals any of the naturally occurring L-amino acids
PYPFCXPSPFPSSAAPHSQSDAAGTTITRSGQVNRDTSNSRAGLPPAFWEGKRCSPELIPSDSAARLVGLLFPTFCFFFFLCKSQMLLSIAFCD

SEQ ID NO: 1442 - protein, 104 aa, Homo sapiens
  SITE (104): Xaa equals any of the naturally occurring L-amino acids
MGFSGPALLFPIFLLHSASSMLSHTSTIVQTNKQTEERKDGEFCNRAAKSQSKQEEVEGTKTNKQRCLDYSTVDMPSILACAPLSITGHNSEEVQIKWCLFVCX

SEQ ID NO: 1443 - protein, 104 aa, Homo sapiens; identical to SEQ ID NO: 1442
  SITE (104): Xaa equals any of the naturally occurring L-amino acids

SEQ ID NO: 1444 - protein, 88 aa, Homo sapiens [sequence omitted]

SEQ ID NO: 1445 - protein, 64 aa, Homo sapiens [sequence omitted]

SEQ ID NO: 1446 - protein, 88 aa, Homo sapiens [sequence omitted]

SEQ ID NO: 1447 - protein, 82 aa, Homo sapiens
  SITE (61): Xaa equals any of the naturally occurring L-amino acids
MASHSFLLDIYLVLSLWKCIPGLVQDVFLEMKVLTESALCKVMTLEPLQHSVLVFRCWQSXFQAKSSRPCQASIFAYYTLNF

SEQ ID NO: 1448 - protein, 82 aa, Homo sapiens
MASHSFLLDIYLVLSLWKCIPGLVQDVFLEMKVLTESALCKVMTLEPLQHSVLVFRCWQSPFQAKSSRPCQASIFAYYTLNF

SEQ ID NO: 1449 - protein, 103 aa, Homo sapiens
MQSFHHPLRILLWLPLVTKKSLCPVHKTMTQLSLVLASLSNSLSFGYPGFVRANRQTSLIGEFLGGGGWHAFAYCFLSAENASLSLAVSATPPDLVSLICLSQ

SEQ ID NO: 1450 - protein, 50 aa, Homo sapiens
  SITE (33): Xaa equals any of the naturally occurring L-amino acids
AAMRWRWWQRLLPWRLLQARGFPQNSAPSLGLXARTYSQGDCSYSRTALL

SEQ ID NO: 1451 - protein, 130 aa, Homo sapiens
  SITE (31): Xaa equals any of the naturally occurring L-amino acids
  SITE (115): Xaa equals any of the naturally occurring L-amino acids
  SITE (116): Xaa equals any of the naturally occurring L-amino acids
  SITE (122): Xaa equals any of the naturally occurring L-amino acids
  SITE (126): Xaa equals any of the naturally occurring L-amino acids
  SITE (127): Xaa equals any of the naturally occurring L-amino acids
MRWRWWQRLLPWRLLQARGFPQNSAPSLGLXARTYSQGDCSYSRTALYDLLGVPSTATQAQIKAAYYRQCFLYHPDRNSGSAEAAERFTRISQAYVVLGSAPSVASMIAAYSATXXCADLAXGLQXXRHP

SEQ ID NO: 1452 - protein, 30 aa, Homo sapiens
LNPWPLIVYLCWDPKELYSPCPPRPAQLSR

SEQ ID NO: 1453 - protein, 226 aa, Homo sapiens
MAAMRWRWWQRLLPWRLLQARGFPQNSAPSLGLGARTYSQGDCSYSRTALYDLLGVPSTATQAQIKAAYYRQCFLYHPDRNSGSAEAAERFTRISQAYVVLGSATLRRKYDRGLLSDEDLRGPGVRPSRTPAPDPGSPRTPPPTSRTHDGSRASPGANRTMFNFDAFYQAHYGEQLERERRLRARREALRKRQEYRSMKGLRWEDTRDTAAIFLIFSIFIIIGFYI

SEQ ID NO: 1454 - protein, 302 aa, Homo sapiens
MLVTNRPGVLKEPKLMGAISFFIFFFTLLVLARQNEYYCRLDFLWKKKLRQEREETETMENLTRLLLENVLPAHVAPQFIGQNRRNEDLYHQSYECVCVLFASVPDFKEFYSESNINHEGLECLRLLNEIIADFDELLSKPKFSGVEKIKTIGSTYMAATGLNATSGQDAQQDAERSCSHLGTMVEFAVALGSKLDVINKHSFNNFRLRVGLNHGPVVAGVIGAQKPQYDIWGNTVNVASRMESTGVLGKIQVTEETAWALQSLGYTCYSRGVIKVKGKGQLCTYFLNTDLTRTGPPSATLG

SEQ ID NO: 1455 - protein, 76 aa, Homo sapiens
  SITE (11): Xaa equals any of the naturally occurring L-amino acids
MGPFFPYSLLXFFPCSFSSPSFIFLLLILKTGCSLFPCCPISPLCPYFSQSLSPLKSRAGRCYWCFFTLGPSSYLL

SEQ ID NO: 1456 - protein, 61 aa, Homo sapiens
TLTQHQGAHLGPFLDMSFLHYHSHEPPTSGIADQGWGENVACCFLVLVIIYLNKQCCKYLP

SEQ ID NO: 1457 - protein, 110 aa, Homo sapiens
  SITE (8): Xaa equals any of the naturally occurring L-amino acids
MRLSCPRXPGWMGPFFPYSLLSFFPCSFSSPSFIFLLLILKTGCSLFPCCPISPLCPYFSQSLSPLKSRAGRCYWCFFTLGPSSIFVFSVYPLPDTSFSPSLGPKAENQC

SEQ ID NO: 1458 - protein, 99 aa, Homo sapiens
MGPFFPYSLLSFFPCSFSSPSFIFLLLILKTGCSLFPCCPISPLCPYFSQSLSPLKSRAGRCYWCFFTLGPSSIFVFSVYPLPDTSFSPSLGPKAENQC

SEQ ID NO: 1459 - protein, 98 aa, Homo sapiens
MFICFLTLLTPGFSLSLRRKHYLITFRWFTYSVKNMCKYFVQSPVSNKQPYVVTNHLFCHSVLGHRSVGMVSDLDAPTFHVRPRTVPWSVDSWSALTG

SEQ ID NO: 1460 - protein, 98 aa, Homo sapiens; identical to SEQ ID NO: 1459

SEQ ID NO: 1461 - protein, 33 aa, Homo sapiens
MLVLVSGIIFSLADRSSSSTIRMDALAFLQGLL

SEQ ID NO: 1462 - protein, 89 aa, Homo sapiens
MLVLVSGIIFSLADRSSSSTIRMDALAFLQGLLGTEPAEAFHPHLPILLPPVMACVADPFYKIAARGPGGAAGAGAGPVAAAQASDAGS

SEQ ID NO: 1463 - protein, 125 aa, Homo sapiens
MYFIFTSFWAYKIYYVYGFMMLVLVILCIVTVCVTIVCTYFLLNAEDYRWQWTSFLSAASTAIYVYMYSFYYYFFKTKMYGLFQTSFYFGYMAVFSTALGIMCGAIGYMGTSAFVRKIYTNVKID

SEQ ID NO: 1464 - protein, 125 aa, Homo sapiens; identical to SEQ ID NO: 1463

SEQ ID NO: 1465 - protein, 250 aa, Homo sapiens
MRGTPKTHLLAFSLLCLLSKVRTQLCPTPCTCPWPPPRCPLGVPLVLDGCGCCRVCARRLGEPCDQLHVCDASQGLVCQPGAGPGGRGALCLLAEDDSSCEVNGRLYREGETFQPHCSIRCRCEDGGFTCVPLCSEDVRLPSWDCPHPRRVEVLGKCCPEWVCGQGGGLGTQPLPAQGPQFSGLVSSLPPGVPCPEWSTAWGPCSTTCGLGMATRVSNQNRFCRLETQRRLCLSRPCPPSRGRSPQNSAF

SEQ ID NO: 1466 - protein, 250 aa, Homo sapiens; identical to SEQ ID NO: 1465

SEQ ID NO: 1467 - protein, 388 aa, Homo sapiens
  SITE (277): Xaa equals any of the naturally occurring L-amino acids
MMTITFLPYTFSLMVTFPDVPLGIFLFCVCVIAIGVVQALIVGYAFHFPHLLSPQIQRSAHRALYRRHVLGIVLQGPALCFAAAIFSLFFVPLSYLLMVTVILLPYVSKVTGWCRDRLLGHREPSAHPVEVFSFDLHEPLSKERVEAFSDGVYAIVATLLILDICEDNVPDPKDVKERFSGSLVAALSATGPRFLAYFGSFATVGLLWFAHHSLFLHVRKATRAMGLLNTLSLAFVGGLPLAYQQTSAFARQPRDELERVRVSCTIIFLASIFQLAXWTTALLHQAETLQPSVWFGGREHVLMFAKLALYPCASLLAFASTCLLSRFSVGIFHLMQIAVPCAFLLLRLLVGLALATLRVLRGLARPEHPPPAPTGQDDPQSQLLPAPC

SEQ ID NO: 1468 - protein, 388 aa, Homo sapiens
MMTITFLPYTFSLMVTFPDVPLGIFLFCVCVIAIGVVQALIVGYAFHFPHLLSPQIQRSAHRALYRRHVLGIVLQGPALCFAAAIFSLFFVPLSYLLMVTVILLPYVSKVTGWCRDRLLGHREPSAHPVEVFSFDLHEPLSKERVEAFSDGVYAIVATLLILDICEDNVPDPKDVKERFSGSLVAALSATGPRFLAYFGSFATVGLLWFAHHSLFLHVRKATRAMGLLNTLSLAFVGGLPLAYQQTSAFARQPRDELERVRVSCTIIFLASIFQLAMWTTALLHQAETLQPSVWFGGREHVLMFAKLALYPCASLLAFASTCLLSRFSVGIFHLMQIAVPCAFLLLRLLVGLALATLRVLRGLARPEHPPPAPTGQDDPQSQLLPAPC

SEQ ID NO: 1469 - protein, 262 aa, Homo sapiens
  SITE (231): Xaa equals any of the naturally occurring L-amino acids
MSPPPLLQPLLLLLPLLNVEPSGATLIRIPLHRVQPGRRILNLLRGWREPAELPKLGAPSPGDKPIFVPLSNYRDVQYFGEIGLGTPPQNFTVAFDTGSSNLWVPSRRCHFFSVPCWLHHRFDPKASSSFQANGTKFAIQYGTGRVDGILSEDKLTIGGIKGASVIFGEALWEPSLVFAFAHFDGILGLGFPILSVEGVRPPMDVLVEQGLLDKPVFSFYLNRDPEEPDGXELVLGGSDPAHYIPPSPFVPVRSPPMADPQG

SEQ ID NO: 1470 - protein, 145 aa, Homo sapiens
MSPPPLLQPLLLLLPLLNVEPSGATLIRIPLHRVQPGRRILNLLRGWREPAELPKLGAPSPGDKPIFVPLSNYRDVQYFGEIGLGTPPQNFTVAFDTGSSNLWVPSRRCHFFSVPCWLHHRFDPKASSSFRPMGPSLPFNMELGG

SEQ ID NO: 1471 - protein, 212 aa, Homo sapiens
  SITE (9): Xaa equals any of the naturally occurring L-amino acids
GSAGTARIXGSTTRPDPEEPDGGELVLGGSDPAHYIPPLTFVPVTVPAYWQIHMERVKVGPGLTLCAKGCAAILDTGTSLITGPTEEIRALHAAIGGIPLLAGEYIILCSEIPKLPAVSFLLGGVWFNLTAHDYVIQTTRNGVRLCLSGFQALDVPPPAGPFWILGDVFLGTYVAVFDRGDMKSSARVGLARARTRGADLGWGETAQAQFPG

SEQ ID NO: 1472 - protein, 150 aa, Homo sapiens [sequence omitted]

SEQ ID NO: 1473 - protein, 150 aa, Homo sapiens [sequence omitted]

SEQ ID NO: 1474 - protein, 353 aa, Homo sapiens [sequence omitted]

SEQ ID NO: 1475 - protein, 353 aa, Homo sapiens [sequence omitted]

SEQ ID NO: 1476 - protein, 80 aa, Homo sapiens
  SITE (11): Xaa equals any of the naturally occurring L-amino acids
MTHCLLHGMGXAGAASLTPKPMSLISAYCGGLWLAAVAVMVQMAALCGAQDIQDKFSSILSRGQEAYERLLWNGEFGEPK

SEQ ID NO: 1477 - protein, 415 aa, Homo sapiens
VGLVSMLGIPIPGAEGAPVLNSLVFLSGQSTPTQKGVGIAGAVCVSSKLRPRGQCRLEFSLAWDMPRIMFGAKGQVHYRRYTRFFGQDGDAAPALSHYALCRYAEWEERISAWQSPVLDDRSLPAWYKSALFNELYFLADGGTVWLEVLEDSLPEELGRNMCHLRPTLRDYGRFGYLEGQEYRMYNTYDVHFYASFALIMLWPKLELSLQYDMALATLREDLTRRRYLMSGVMAPVKRRNVIPHDIGDPDDEPWLRVNAYLIHDTADWKDLNLKFVLQVYRDYYLTGDQNFLKDMWPVCLAVMESEMKFDKDHDGLIENGGYADQTYDGWVTTGPSAYCGGLWLAAVAVMVQMAALCGAQDIQDKFSSILSRGQEAYERLLWNGRYYNYDSSSRPQSRSVMSDQCAGQWFLKACG

SEQ ID NO: 1478 - protein, 86 aa, Homo sapiens
  SITE (75): Xaa equals any of the naturally occurring L-amino acids
MSLGGSQSSLVSWRATQIACMTLSWPLWTCWLAAPLSLTKSPWRQWSTHVKGFNLASSQAEVQPVGQTLASEKKXLQEVLARAIQH

SEQ ID NO: 1479 - protein, 159 aa, Homo sapiens
  SITE (153): Xaa equals any of the naturally occurring L-amino acids
  SITE (158): Xaa equals any of the naturally occurring L-amino acids
MHRLIFVYTLICANFCSCRDTSATPQSASIKALRNANLRRDESNHLTDLYRRDETIQVKGNGYVQSPRFPNSYPRNLLLTWRLHSQENTRIQLVVDNQFGLEEAENDICRYDFVEVEDISETSTIIRGRWCGHKEVPPRIKSRTNHIKITFKXDDYFXA

SEQ ID NO: 1480 - protein, 89 aa, Homo sapiens
  SITE (33): Xaa equals any of the naturally occurring L-amino acids
  SITE (63): Xaa equals any of the naturally occurring L-amino acids
LIIKKGKIWFPEKRPIPKHFFHEKHCILTYVDXNNLSPKPCHNNISALEIKSLCFLCILLRHXYSFNTYLKNLLRRFFIIVLQKTMYKL

SEQ ID NO: 1481 - protein, 370 aa, Homo sapiens
  SITE (216): Xaa equals any of the naturally occurring L-amino acids
MHRLIFVYTLICANFCSCRDTSATPQSASIKALRNANLRRDESNHLTDLYRRDETIQVKGNGYVQSPRFPNSYPRNLLLTWRLHSQENTRIQLVFDNQFGLEEAENDICRYDFVEVEDISETSTIIRGRWCGHKEVPPRIKSRTNQIKITFKSDDYFVAKPGFKIYYSLLEDFQPAAASETNWESVTSSISGVSYNSPSVTDPTLIADALDKKIAXFDTVEDLLKYFNPESWQEDLENMYLDTPRYRGRSYHDRKSKVDLDRLNDDAKRYSCTPRNYSVNIREELKLANVVFFPRCLLVQRCGGNCGCGTVNWRSCTCNSGKTVKKYHEVLQFEPGHIKRRGRAKTMALVDIQLDHHERCDCICSSRPPR

SEQ ID NO: 1482 - protein, 370 aa, Homo sapiens
MHRLIFVYTLICANFCSCRDTSATPQSASIKALRNANLRRDESNHLTDLYRRDETIQVKGNGYVQSPRFPNSYPRNLLLTWRLHSQENTRIQLVFDNQFGLEEAENDICRYDFVEVEDISETSTIIRGRWCGHKEVPPRIKSRTNQIKITFKSDDYFVAKPGFKIYYSLLEDFQPAAASETNWESVTSSISGVSYNSPSVTDPTLIADALDKKIAEFDTVEDLLKYFNPESWQEDLENMYLDTPRYRGRSYHDRKSKVDLDRLNDDAKRYSCTPRNYSVNIREELKLANVVFFPRCLLVQRCGGNCGCGTVNWRSCTCNSGKTVKKYHEVLQFEPGHIKRRGRAKTMALVDIQLDHHERCDCICSSRPPR

SEQ ID NO: 1483 - protein, 229 aa, Homo sapiens
  SITE (206): Xaa equals any of the naturally occurring L-amino acids
MYKLLLFDLLTVLAVALLIQFPRKLLCGLCPGALGRLAGTQEFQVPDEVLGLIYAQTVVWVGSFFCPLLPLLNTVKFLLLFYLKKLTLFSTCSPAARTFRASAANFFFPLVLLLGLAISSVPLLYSIFLIPPSKLCGPFRGQSSIWAQIPESISSLPETTQNFLFFLGTQAFAVPLLLISSILMAYTVALANSYGRLISELKRQRXTEAQNKVFLARRAVALTSTKPAL

SEQ ID NO: 1484 - protein, 85 aa, Homo sapiens
  SITE (33): Xaa equals any of the naturally occurring L-amino acids
  SITE (62): Xaa equals any of the naturally occurring L-amino acids
FLGTQAFAVPLLLISRSQTFGYNGRACQEWLPXLISSILMAYTVALANSYGRLISELKRQRXTEAQNKVFLARRAVALTSTKPAL

SEQ ID NO: 1485 - protein, 229 aa, Homo sapiens; identical to SEQ ID NO: 1483
  SITE (206): Xaa equals any of the naturally occurring L-amino acids

SEQ ID NO: 1486 - protein, 93 aa, Homo sapiens
MATFSLCYLMAFPLCAGIAGISVCVKISCFYKDISQTGLRPTLKAYLNFNLLFSGPISKYSLILRYWYLGLQHTNFGVDTIQPITNCAHEMIY

SEQ ID NO: 1487 - protein, 124 aa, Homo sapiens
  SITE (19): Xaa equals any of the naturally occurring L-amino acids
  SITE (25): Xaa equals any of the naturally occurring L-amino acids
  SITE (28): Xaa equals any of the naturally occurring L-amino acids
  SITE (56): Xaa equals any of the naturally occurring L-amino acids
  SITE (70): Xaa equals any of the naturally occurring L-amino acids
ALPFTLNKTSNYPQDLVLXSLLLGXNYXQLQILLECIFPVPHSLLYVVLPNSIDLXQKLPRDLPHLPCPXFLWPRPGSPPKCFLSLSLTALPLSSCRYTLPPSPHPLMPSPLLPSWVQPSCYLA

SEQ ID NO: 1488 - protein, 59 aa, Homo sapiens
MATFSLCYLMAFPLCAGIAGISVCVKISCFYKDISQTGLRPTLKAYLNFNLLFSGPIQI

SEQ ID NO: 1489 - protein, 314 aa, Homo sapiens
GSGRQAGWPRGLLSGPAPSERSAVARLAPTESLARMEAVVNLYQEVMKHADPRIQGYPLMGSPLLMTSILLTYVYFVLSLGPRIMANRKPFQLRGFMIVYNFSLVALSLYIVYEFLMSGWLSTYTWRCDPVDYSNSPEALRMVRVAWLFLFSKFIELMDTVIFILRKKDGQVTFLHVFHHSVLPWSWWWGVKIAPGGMGSFHAMINSSVHVIMYLYYGLSAFGPVAQPYLWWKKHMTAIQLIQFVLVSLHISQYYFMSSCNYQYPVIIHLIWMYGTIFFMLFSNFWYHSYTKGKRLPRALQQNGAPGIAKVKAN

SEQ ID NO: 1490 - protein, 258 aa, Homo sapiens [sequence omitted]

SEQ ID NO: 1491 - protein, 222 aa, Homo sapiens
MKHADPRIQGYPLMGSPLLMTSILLTYVYFVLSLGPRIMANRKPFQLRGFMIVYNFSLVALSLYIVYEVIFILRKKDGQVTFLHVFHHSVLPWSWWWGVKIAPGGMGSFHAMINSSVHVIMYLYYGLSAFGPVAQPYLWWKKHMTAIQLIQFVLVSLHISQYYFMSSCNYQYPVIIHLIWMYGTIFFMLFSNFWYHSYTKGKRLPRALQQNGAPGIAKVKAN

SEQ ID NO: 1492 - protein, 93 aa, Homo sapiens [sequence omitted]

SEQ ID NO: 1493 - protein, 65 aa, Homo sapiens
KLSNCNCFQLLSEVGIMVDLISSVLFLQLYYQVLNFGMIVSSALMIWKGLMVITGSESPIVVVLR

SEQ ID NO: 1494 - protein, 93 aa, Homo sapiens [sequence omitted]

SEQ ID NO: 1495 - protein, 81 aa, Homo sapiens
MGKPSLLFFGLMASWRTRSQARRTWSTSSRMPGRNVLLRSRKRRSQISSSISWSIALGPVMPWPGLILFLKISRSSTPTRL

SEQ ID NO: 1496 - protein, 81 aa, Homo sapiens; identical to SEQ ID NO: 1495

SEQ ID NO: 1497 - protein, 47 aa, Homo sapiens
  SITE (47): Xaa equals any of the naturally occurring L-amino acids
MRLRFWLLIWLLLGFISHQPTPVINSLAVYRHRETDFGVRVRDHPWX

SEQ ID NO: 1498 - protein, 394 aa, Homo sapiens
  SITE (73): Xaa equals any of the naturally occurring L-amino acids
  SITE (194): Xaa equals any of the naturally occurring L-amino acids
  SITE (200): Xaa equals any of the naturally occurring L-amino acids
  SITE (210): Xaa equals any of the naturally occurring L-amino acids
  SITE (225): Xaa equals any of the naturally occurring L-amino acids
  SITE (237): Xaa equals any of the naturally occurring L-amino acids
  SITE (389): Xaa equals any of the naturally occurring L-amino acids
EVINTLADHRHRGTDFGGSPWLLIITVFLRSYKFAISLCTSYLCVSFLKTIFPSQNGHDGSTDVQQRARRSNXRRQEGIKIVLEDIFTLWRQVETKVRAKIRKMKVTTKVNRHDKINGKRKTAKEHLRKLSMKEREHGEKERQVSEAEENGKLDMKEIHTYMEMFQRAQALRRRAEDYYRCKITPSARKPLCNXVRMAAXEHRHSSGLPXWPYLTAETLKNRMGXQPPPPTQQHSIXDNSLSLKTPPECLLHPLPPSVDDNIKECPLAPLPPSVDDNLKECLLVPLPPSPLPPSVDDNLKDCLFVPLPPSPLPPSVDDNLKTPPLATQEAEAEKPPKPKRWRVDEVEQSPKPKRRRADEVEQSPKPKRQREAEAQQLPKPKRRRLSKLXTRHCT

SEQ ID NO: 1499 - protein, 212 aa, Homo sapiens
  SITE (54): Xaa equals any of the naturally occurring L-amino acids
  SITE (74): Xaa equals any of the naturally occurring L-amino acids
  SITE (81): Xaa equals any of the naturally occurring L-amino acids
  SITE (101): Xaa equals any of the naturally occurring L-amino acids
  SITE (122): Xaa equals any of the naturally occurring L-amino acids
MRLRFWLLIWLLLGFISHQPTPVINSLAVYRHRETDFGVGVRDHPGQHGKTPSXQKLDNLIIIIIGFLRRYTFXILFCTSXLCVSFLKTIFWSRNGHDGSXDVQQRAWRSNRSRQKGLRSIXMHTKKRVSSFRGNKIGLKDVITLRRHVETKVRAKIRKRKVTTKINRHNKINGKRKTARKQKMFQRAQELRRRAEDYHKCKVRSFLPAVAG

SEQ ID NO: 1500 - protein, 121 aa, Homo sapiens
  SITE (110): Xaa equals any of the naturally occurring L-amino acids
  SITE (112): Xaa equals any of the naturally occurring L-amino acids
  SITE (114): Xaa equals any of the naturally occurring L-amino acids
  SITE (116): Xaa equals any of the naturally occurring L-amino acids
MATLVWRLYLLQPELVLPSPPPPPRFPGPVQTPKIPGPARGPRTGFQPPAFSFPSPTPFFSAGTPVLSWKFAVLCPIAQELLPAEKGARNKCSGLSRSYIFAMLPEMGGXNXLXQXNEWHG

SEQ ID NO: 1501 - protein, 128 aa, Homo sapiens
MDRLKSHLTVCFLPSVPFLILVSTLATAKSVTNSTLNGTNVVLGSVPVIIARTDHIIVKEGNSALINCSVYGIPDPQFKWYNSIGKLLKEEEDEKERGGGKWQMHDSGLLNITKVSFSDRGKYTVCGF

SEQ ID NO: 1502 - protein, 120 aa, Homo sapiens
  SITE (5): Xaa equals any of the naturally occurring L-amino acids
  SITE (7): Xaa equals any of the naturally occurring L-amino acids
  SITE (8): Xaa equals any of the naturally occurring L-amino acids
  SITE (14): Xaa equals any of the naturally occurring L-amino acids
  SITE (40): Xaa equals any of the naturally occurring L-amino acids
LEFKXPXXQVPPWXWLSLFKKYRSATIANARTWVFCSFFXVLILLFLYNGVIVINTNCSFWFSPHCHFCPYVSLEHVPQRLWYQSPVPGLISTSHITFVMFQSSYEACYFFFIPQAYFHR

SEQ ID NO: 1503 - protein, 409 aa, Homo sapiens
MDRLKSHLTVCFLPSVPFLILVSTLATAKSVTNSTLNGTNVVLGSVPVIIARTDHIIVKEGNSALINCSVYGIPDPQFKWYNSIGKLLKEEEDEKERGGGKWQMHDSGLLNITKVSFSDRGKYTCVASNIYGTVNNTVTLRVIFTSGDMGVYYMVVCLVAFTIVMVLNITRLCMMSSHLKKTEKAINEFFRTEGAEKLQKAFEIAKRIPIITSAKTLELAKVTQFKTMEFARYIEELARSVPLPPLIMNCRTIMEEIMEVVGLEEQGQNFVRHTPEGQEAADRDEVYTIPNSLKRSDSPAADSDASSLHEQPQQIAIKVSVHPQSKKEHADDQEGGQFEVKDVEETELSAEHSPETAEPSTDVTSTELTSEEPTPVEVPDKVLPPAYLEATEPAVTHDKNTCIIYESHV

SEQ ID NO: 1504 - protein, 107 aa, Homo sapiens
  SITE (63): Xaa equals any of the naturally occurring L-amino acids
  SITE (64): Xaa equals any of the naturally occurring L-amino acids
  SITE (82): Xaa equals any of the naturally occurring L-amino acids
SMKAKRNKGRWVAAGPTAATAWIVLTVQAACPEGKCPLPGVCAPITWAPSYLTAGKAKLAGPXXYKPGPVLKAAHLPMGQHXHTTPWWQPLFIISVSRYPPRTPKQH

SEQ ID NO: 1505 - protein, 106 aa, Homo sapiens
MKAKRNKGRWVAAGPTAATAWIVLTVQAACPEGKCPLPGVCAPITWAPSYLTAGKAKLAGPRTYKPGPVLKAAHLPMGQHPHTTPWWQPLFIISVSRYPPRTPKQH

SEQ ID NO: 1506 - protein, 106 aa, Homo sapiens; identical to SEQ ID NO: 1505

SEQ ID NO: 1507 - protein, 109 aa, Homo sapiens
MVSCWDQNLILFLTCLLAVLIFCLVLAVYIVFFKFLKASLIYVPREWVTLTKANDVQKGHDLGLSYCRTQSTAWPPPCLGHHLHLESSLTLESFGLLTIPISDSVSLIT

SEQ ID NO: 1508 - protein, 71 aa, Homo sapiens
  SITE (32): Xaa equals any of the naturally occurring L-amino acids
GVRIDASGSLAAVLPLNHYTITEFNFLQFQGXTELSSDSKIRISNREWIHLRIGETDIHDLKQKSETKLIN

SEQ ID NO: 1509 - protein, 109 aa, Homo sapiens; identical to SEQ ID NO: 1507

SEQ ID NO: 1510 - protein, 82 aa, Homo sapiens
MGLQSRLSQPCHCRHLGLGNSVVGTVLFLVGCLVASLPPPTRCQGHCSPQPPAPVVTIVSKHCQMVQGKGKIAPVEKSTAVK

SEQ ID NO: 1511 - protein, 82 aa, Homo sapiens; identical to SEQ ID NO: 1510

SEQ ID NO: 1512 - protein, 115 aa, Homo sapiens [sequence omitted]

SEQ ID NO: 1513 - protein, 115 aa, Homo sapiens [sequence omitted]

SEQ ID NO: 1514 - protein, 56 aa, Homo sapiens; identical to SEQ ID NO: 987

SEQ ID NO: 1515 - protein, 56 aa, Homo sapiens; identical to SEQ ID NO: 987

SEQ ID NO: 1516 - protein, 147 aa, Homo sapiens [sequence omitted]

SEQ ID NO: 1517 - protein, 147 aa, Homo sapiens [sequence omitted]

SEQ ID NO: 1518 - protein, 92 aa, Homo sapiens
  SITE (70): Xaa equals any of the naturally occurring L-amino acids
MWQYHRLSCTAWQPVILSFSLSVGHRILLALFFFILHLSILIATECRPWYSFHLVSLPSFLPQFLLCLAXICLFGFTTLLFSFCCQVHVLGH

SEQ ID NO: 1519 - protein, 58 aa, Homo sapiens
  SITE (38): Xaa equals any of the naturally occurring L-amino acids
  SITE (58): Xaa equals any of the naturally occurring L-amino acids
DYILMRQLRPANFCIFSRDRFHPVSQAGLELLTSSDLXAFGLPKYWYYRHEPPCLASX

SEQ ID NO: 1520 - protein, 80 aa, Homo sapiens
  SITE (25): Xaa equals any of the naturally occurring L-amino acids
  SITE (80): Xaa equals any of the naturally occurring L-amino acids
MASWPFLSPMGPIALALLTQALSSXVGLCLALTCSRRPSPDSVCASCRFPLVPLCCQPSLPALLRPVSHCRYPGTSWVSX

SEQ ID NO: 1521 - protein, 56 aa, Homo sapiens
  SITE (46): Xaa equals any of the naturally occurring L-amino acids
VDLVSVNVGSEFLVTLLFFLGPVTGHLDRLNAILELDSYVFICTPXSHLPVASSDA

SEQ ID NO: 1522 - protein, 151 aa, Homo sapiens
  SITE (54): Xaa equals any of the naturally occurring L-amino acids
  SITE (92): Xaa equals any of the naturally occurring L-amino acids
  SITE (95): Xaa equals any of the naturally occurring L-amino acids
  SITE (117): Xaa equals any of the naturally occurring L-amino acids
  SITE (122): Xaa equals any of the naturally occurring L-amino acids
  SITE (128): Xaa equals any of the naturally occurring L-amino acids
  SITE (132): Xaa equals any of the naturally occurring L-amino acids
  SITE (139): Xaa equals any of the naturally occurring L-amino acids
MPLFFTRFHPALGPLALSLLAGFAAGSLQAIGRTEEKGVRVLTSQAPPYRVMGXLHSSTKGFSFCQGVCPRALSLWVTTPLFLPPSPRLAMXPTXSCPGYCHHVSLYPVYALQLVLXQILLXWPNLMXYWYXHLMTGPXSDQKRKSVVTLV

SEQ ID NO: 1523 - protein, 79 aa, Homo sapiens
  SITE (57): Xaa equals any of the naturally occurring L-amino acids
RVDNFLCQFIRIYLILLSSHIIFHNTNVSCYPMESHLLFSYNNTAVSILVHRFFNIXISKFLKVISWDRNRNGIGISKS

SEQ ID NO: 1524 - protein, 121 aa, Homo sapiens
MPLFFTRFHPALGPLALSLLAGFAAGSLQAIGRTEEKGVRVLTSQAPPYRVMGQLHSSTKGFSFCQGVCPRALSLWVTTPLFLPPSPRLAMVPTVSCPGYCPSCFSVSCLCFTTGPSSNSA

SEQ ID NO: 1525 - protein, 91 aa, Homo sapiens
  SITE (19): Xaa equals any of the naturally occurring L-amino acids
MGPVSELSIFILLFVFCFXFSLMPDIRRTLHFWLHSLLYPHETDQCLQSSAIPFQVFYVQQKKRASLSSSSHIIKGIAPLLNQSVNHSGPI

SEQ ID NO: 1526 - protein, 66 aa, Homo sapiens
  SITE (4): Xaa equals any of the naturally occurring L-amino acids
  SITE (13): Xaa equals any of the naturally occurring L-amino acids
STLXVTFICSSRXLLRERGAVLKTNPIPILLKKPLLCPSFIHNLVPHPHLPQLLLFSNFLCRCPYH

SEQ ID NO: 1527 - protein, 91 aa, Homo sapiens
MGPVSELSIFILLFVFCFVFSLMPDIRRTLHFWLHSLLYPHETDQCLQSSAIPFQVFYVQQKKRASLSSSSHIIKGIAPLLNQSVNHSGPI

SEQ ID NO: 1528 - protein, 336 aa, Homo sapiens
MALARPVRLFSLVTRLLLAPRRGLTVRSPDEPLPVVRIPVALQRQLEQRQSRRRNLPRPVLVRPGPLLVSARRPELNQPARLTLGRWERAPLASQGWKSRRARRDHFSIERAQQEAPAVRKLSSKGSFADLGLEPRVLHALQEAAPEVVQPTTVQSSTIPSLLRGRHVVCAAETGSGKTLSYLLPLLQRLLGQPSLDSLPIPAPRGLVLVPSRELAQQVRAVAQPLGRSLGLLVRDLEGGHGMRRIRLQLSRQPSADVLVATPGALWKALKSRLISLEQLSFLVLDEADTLLDESFLELVDYILEKSHIAEGPADLEDPFNPKAQLVLVGATFPEV

SEQ ID NO: 1529 - protein, 336 aa, Homo sapiens
  SITE (224): Xaa equals any of the naturally occurring L-amino acids
MALARPVRLFSLVTRLLLAPRRGLTVRSPDEPLPVVRIPVALQRQLEQRQSRRRNLPRPVLVRPGPLLVSARRPELNQPARLTLGRWERAPLASQGWKSRRARRDHFSIERAQQEAPAVRKLSSKGSFADLGLEPRVLHALQEAAPEVVQPTTVQSSTIPSLLRGRHVVCAAETGSGKTLSYLLPLLQRLLGQPSLDSLPIPAPRGLVLVPSRELAQQVRAVAXPLGRSLGLLVRDLEGGHGMRRIRLQLSRQPSADVLVATPGALWKALKSRLISLEQLSFLVLDEADTLLDESFLELVDYILEKSHIAEGPADLEDPFNPKAQLVLVGATFPEV

SEQ ID NO: 1530 - protein, 93 aa, Homo sapiens [sequence omitted]

SEQ ID NO: 1531 - protein, 219 aa, Homo sapiens
  SITE (41): Xaa equals any of the naturally occurring L-amino acids
AAATAASLSPRGCRLRTPSSDVSPSRAPPPSAAPLPTGRAXMSPSGRLCLLTIVGLILPTRGQTLKDTTSSSSADSTIMDIQVPTRAPDAVYTELQPTSPTPTWPADETPQPQTQTQQLEGTDGPLVTDPETHKSTKAAHPTDDTTTLSERPSPSTDVQTDPQTLKPSGFHEDDPFFYDEHTLRKRGLLVAAVLFITGIIILTSGKCRQLSRLCRNHCR

SEQ ID NO: 1532 - protein, 178 aa, Homo sapiens [sequence omitted]

SEQ ID NO: 1533 - protein, 152 aa, Homo sapiens
MELPAVNLKVILLGHWLLTTWGCIVFSGSYAWANFTILALGVWAVAQRDSIDAISMFLGGLLATIFLDIVHISIFYPRVSLTDTGRFGVGMAILSLLLKPLSCCFVYHMYRERGGFLGSSQDRSAYQTIDSAEAPADPFAVPEGRSQDARGY

SEQ ID NO: 1534 - protein, 159 aa, Homo sapiens
MELPAVNLKVILLGHWLLTTWGCIVFSGSYAWANFTILALGVWAVAQRDSIDAISMFLGGLLATIFLDIVHISIFYPRVSLTDTGRFGVGMAILSLLLKPLSCCFVYHMYRERGGELLVHTGFLGSSQDRSAYQTIDSAEAPADPFAVPEGRSQDARGY

SEQ ID NO: 1535 - protein, 91 aa, Homo sapiens
MPLAPLLLVLSPFSFDQVVQARLEVPVFKQRDLCNYVLILVGAQLKPLAMLVKNIRDYRLEPPCPACIDTFYPTFKTGMFSLCFKMPLKYF

SEQ ID NO: 1536 - protein, 64 aa, Homo sapiens
SATHQQALVCDVLLPVSMCSHENLYILCSGVSYFIFFFSCVTSVTSGLGIPSYPEVRKYSSIFF

SEQ ID NO: 1537 - protein, 91 aa, Homo sapiens; identical to SEQ ID NO: 1535

SEQ ID NO: 1538 - protein, 112 aa, Homo sapiens
  SITE (93): Xaa equals any of the naturally occurring L-amino acids
  SITE (98): Xaa equals any of the naturally occurring L-amino acids
  SITE (104): Xaa equals any of the naturally occurring L-amino acids
  SITE (106): Xaa equals any of the naturally occurring L-amino acids
MDLWTTSFFFFAVMHNAAMNINVQVSESGFSFWGRYLGVELLGCVVNLYLFKKWPNCFLNGCIILHPHQQYIRVSCFSTSYLLMAFKNYRHSXKCEVXPHCSLXCXFLITMM

SEQ ID NO: 1539 - protein, 113 aa, Homo sapiens [sequence omitted]

SEQ ID NO: 1540 - protein, 113 aa, Homo sapiens [sequence omitted]

SEQ ID NO: 1541 - protein, 111 aa, Homo sapiens
MRMSLADSLACSVCVALTAAARLLRSRPSSCSSFSWISGTSSSPSFLGSFTSLLGSSLSSLGDSLLGRGTLGNFWEVLISTSTSSWADFSSLVSTSPKVRVPLRPIFTCFL

SEQ ID NO: 1542 - protein, 148 aa, Homo sapiens
  SITE (3): Xaa equals any of the naturally occurring L-amino acids
  SITE (37): Xaa equals any of the naturally occurring L-amino acids
  SITE (41): Xaa equals any of the naturally occurring L-amino acids
  SITE (43): Xaa equals any of the naturally occurring L-amino acids
  SITE (99): Xaa equals any of the naturally occurring L-amino acids
  SITE (121): Xaa equals any of the naturally occurring L-amino acids
GFXAAAAAAAVVAAAAAASVEGRQPPGLGAVGPAGRXAGSXGXRMPAGRVAGAVTGLGVSWLRGKNSGVPGAALPPAAPSVASLVAHSGPAVGPPLSPXSVPQGGYSKSGLPLQDAGSPWXHCRGTDCGSSMLNGVEAGLAAAASCCH

SEQ ID NO: 1543 - protein, 191 aa, Homo sapiens
  SITE (180): Xaa equals any of the naturally occurring L-amino acids
  SITE (181): Xaa equals any of the naturally occurring L-amino acids
  SITE (190): Xaa equals any of the naturally occurring L-amino acids
MSSNTMLQKTLLILISFSVVTWMIFIISQNFTKLWSALNLSISVHYWNNSAKSLFPKTSLIPLKPLTETELRIKEIIEKLDQQIPPRPFTHVNTTTSATHSTATILNPRDTYCRGDQLDILLEVRDHLGQRKQYGGDFLRARMSFPALTAGASGKVMDFTMAPTWQLHSGLGGPGLPGSXXYSPQVEGAXG

SEQ ID NO: 1544 - protein, 165 aa, Homo sapiens
  SITE (2): Xaa equals any of the naturally occurring L-amino acids
  SITE (5): Xaa equals any of the naturally occurring L-amino acids
  SITE (7): Xaa equals any of the naturally occurring L-amino acids
  SITE (28): Xaa equals any of the naturally occurring L-amino acids
  SITE (33): Xaa equals any of the naturally occurring L-amino acids
NXFAXWXQKDTLRIQWKKHSYPFVTFQXYSLIXHDYIPREIDRLSGDKNTAIVITFGQHFRPFPIDIFIRRAIGVQKAIERLFLRSPATKVIIKTENIREMHIETERFGDFHGYIHYLIMKDIFKDLNVGIIDAWDMTIAYGTDTIHPPDHVIGNQINMFLNYIC

SEQ ID NO: 1545 - protein, 303 aa, Homo sapiens
  SITE (176): Xaa equals any of the naturally occurring L-amino acids
  SITE (177): Xaa equals any of the naturally occurring L-amino acids
  SITE (179): Xaa equals any of the naturally occurring L-amino acids
  SITE (192): Xaa equals any of the naturally occurring L-amino acids
  SITE (294): Xaa equals any of the naturally occurring L-amino acids
  SITE (297): Xaa equals any of the naturally occurring L-amino acids
  SITE (302): Xaa equals any of the naturally occurring L-amino acids
MSSNTMLQKTLLILISFSVVTWMIFIISQNFTKLWSALNLSISVHYWNNSAKSLFPKTSLIPLKPLTETELRIKEIIEKLDQQIPPRPFTHVNTTTSATHSTATILNPRDTYCRGDQLDILLEVRDHLGQRKQYGGDFLRARMSSPALTAGASGKVMDFNNGTYLVSFTLFWEGQXXLXLLLIHPSEGASAXWRARNQGYDKIIFKGKFVNGTSHVFTECGLTLNSNAELCEYLDDRDQEAFYCMKPQHMPCEALTYMTTRNREVSYLTDKENSLFHRSKVGVEMMKDRKHIDXTNXNKREXI

SEQ ID NO: 1546 - protein, 1 aa, Homo sapiens
M

SEQ ID NO: 1547 - protein, 547 aa, Homo sapiens
MSSNTMLQKTLLILISFSVVTWMIFIISQNFTKLWSALNLSISVHYWNNSAKSLFPKTSLIPLKPLTETELRIKEIIEKLDQQIPPRPFTHVNTTTSATHSTATILNPRDTYCRGDQLDILLEVRDHLGQRKQYGGDFLRARMSSPALTAGASGKVMDFNNGTYLVSFTLFWEGQVSLSLLLIHPSEGASALWRARNQGYDKIIFKGKFVNGTSHVFTECGLTLNSNAELCEYLDDRDQEAFYCMKPQHMPCEALTYMTTRNREVSYLTDKENSLFHRSKVGVEMMKDRKHIDVTNCNKREKIEETCQVGMKPPVPGGYTLQGKWITTFCNQVQLDTIKINGCLKGKLIYLLGDSTLRQWIYYFPKVVKTLKFFDLHETGIFKKHLLLDAERHTQIQWKKHSYPFVTFQLYSLIDHDYIPREIDRLSGDKNTAIVITFGQHFRPFPIDIFIRRAIGVQKAIERLFLRSPATKVIIKTENIREMHIETERFGDFHGYIHYLIMKDIFKDLNVGIIDAWDMTIAYGTDTIHPPDHVIGNQINMFLNYIC

SEQ ID NO: 1548 - protein, 246 aa, Homo sapiens
  SITE (30): Xaa equals any of the naturally occurring L-amino acids
  SITE (212): Xaa equals any of the naturally occurring L-amino acids
  SITE (220): Xaa equals any of the naturally occurring L-amino acids
  SITE (243): Xaa equals any of the naturally occurring L-amino acids
MASAVRGSRPWPRLGLQLQFAALLLGTLSXQVHTLRPENLLLVSTLDGSLHALSKQTGDLKWTLRDDPVIEGPMYVTEMAFLSDPADGSLYILGTQKQQGLMKLPFTIPELVHASPCRSSDGVFYTGRKQDAWFVVDPESGETQMTLTTEGPSTPRLYIGRTQYTVTMHDPRAPALRWNTTYRRYSTPPMDGSTGKYMSQLGVLREGPAAHXGTPGSGTXLLDTRNLGRALGNGPATPLGTKXRAW

SEQ ID NO: 1549 - protein, 473 aa, Homo sapiens
  SITE (321): Xaa equals any of the naturally occurring L-amino acids
  SITE (386): Xaa equals any of the naturally occurring L-amino acids
  SITE (391): Xaa equals any of the naturally occurring L-amino acids
MASAVRGSRPWPRLGLQLQFAALLLGTLSPQVHTLRPENLLLVSTLDGSLHALSKQTGDLKWTLRDDPVIEGPMYVTEMAFLSDPADGSLYILGTQKQQGLMKLPFTIPELVHASPCRSSDGVFYTGRKQDAWFVVDPESGETQMTLTTEGPSTPRLYIGRTQYTVTMHDPRAPALRWNTTYRRYSAPPMDGSPGKYMSHLASCGMGLLLTVDPGSGTVLWTQDLGVPVMGVYTWHQDGLRQLPHLTLARDTLHFLALRWGHIRLPASGPRDTATLFSTLDTQLLMTLYVGKDETGFYVSKALVHTGVALVPRGLTLAPAXGPTTDEVTLQVSGEREGSPSTAVRYPSGSVALPSQWLLIGHHELPPVLHTTMLRVHPTLGSGTAXTRPPXNTQAPAFFLELLSLSREKLWDSELHPEEKTPDSYLGLGPQDLLAASLTAVLLGGWILFVMRQQQPQVVEKQQETPLAPAAWG

SEQ ID NO: 1550 - protein, 98 aa, Homo sapiens
MCMRLCAALLPAPCTLRASWGVRGAQWGFSSLHEPGDPRGGSIWDEPPPPNAQASPQDPGGGHHSGKPGVGVGFGLSTFLLQIPPTHPSPKSSPLALA

SEQ ID NO: 1551 - protein, 98 aa, Homo sapiens; identical to SEQ ID NO: 1550

SEQ ID NO: 1552 - protein, 94 aa, Homo sapiens [sequence omitted]

SEQ ID NO: 1553 - protein, 49 aa, Homo sapiens
  SITE (1): Xaa equals any of the naturally occurring L-amino acids
  SITE (2): Xaa equals any of the naturally occurring L-amino acids
XXYDEKLIFIQILQTKATDKYSEQVSQVGPGAVLTPVIPALWEAEAGGS

SEQ ID NO: 1554 - protein, 141 aa, Homo sapiens
  SITE (140): Xaa equals any of the naturally occurring L-amino acids
MGPRGCALAHSLLPLLCQHVWTSPRYCRQCTREPRHCCPAPASAGVQYMCAYGCHHPTFAGVYTPSHTTVATSICTQTPPHQCCWSEHTHVVSTTPLLPAYMHMSMDPAATTQMKCFCRHPIRAFLPVEWEHLSPFNTAXA

SEQ ID NO: 1555 - protein, 141 aa, Homo sapiens [sequence omitted]

SEQ ID NO: 1556 - protein, 93 aa, Homo sapiens
MIVNISHEIWWFYKGKVPLHMLTCLLPCKTCLAPPSPSSVTVRPPQPCETVSPLKLFFFINYPVLHMSLLTVRKWTNTLGHEGGALINGISAL

SEQ ID NO: 1557 - protein, 59 aa, Homo sapiens
EEHGITSVIFLPQVHNLNLIIRKHQTNPNQETLYKIMTCDPQNLQGHEQQGKTEDKCTV

SEQ ID NO: 1558 - protein, 93 aa, Homo sapiens; identical to SEQ ID NO: 1556

SEQ ID NO: 1559 - protein, 100 aa, Homo sapiens
  SITE (62): Xaa equals any of the naturally occurring L-amino acids
  SITE (85): Xaa equals any of the naturally occurring L-amino acids
  SITE (88): Xaa equals any of the naturally occurring L-amino acids
  SITE (95): Xaa equals any of the naturally occurring L-amino acids
  SITE (99): Xaa equals any of the naturally occurring L-amino acids
MLLQRTRFLLLFFSFVSSFFLSLPSFSLFFLFLSLSLFCIHVAAKDMISSFFSLPFSFLSFXLSFLLPSFSFFYFFFFWLSFFFXSKXLALVPKXGMQXV

SEQ ID NO: 1560 - protein, 87 aa, Homo sapiens
  SITE (71): Xaa equals any of the naturally occurring L-amino acids
  SITE (86): Xaa equals any of the naturally occurring L-amino acids
MVVMASLQVEPAVGKEQLRERQGPELLGWVAGLAFVCLFACVGVGVAPCHSFDSEAASFLLLYSWCTPRLXSWLRDTPSPLASGTXP

SEQ ID NO: 1561 - protein, 49 aa, Homo sapiens
VRAMFGFLACVSSLRVMASSSSHVTSEDMILFLISCGIYVPHFLYPVDR

SEQ ID NO: 1562 - protein, 168 aa, Homo sapiens [sequence omitted]

SEQ ID NO: 1563 - protein, 200 aa, Homo sapiens
  SITE (140): Xaa equals any of the naturally occurring L-amino acids
  SITE (155): Xaa equals any of the naturally occurring L-amino acids
  SITE (165): Xaa equals any of the naturally occurring L-amino acids
  SITE (173): Xaa equals any of the naturally occurring L-amino acids
  SITE (194): Xaa equals any of the naturally occurring L-amino acids
  SITE (196): Xaa equals any of the naturally occurring L-amino acids
MAVYVGMLRLGRLCAGSSGVLGARAALSRSWQEARLQGVRFLSSREVDRMVSTPIGGLSYVQGCTKKHLNSKTVGQCLETTAQRVPEREALVVLHEDVRLTFAQLKEEVDKAASGLLSIGLCKGDRLGMWGPNSYAWVLXQLATGQAGIILVSVXPAYQAMEWSXSSKKWASXALVVPKQFKTKHNTTFLKQIXPXWRMP

SEQ ID NO: 1564 - protein, 100 aa, Homo sapiens
  SITE (3): Xaa equals any of the naturally occurring L-amino acids
  SITE (12): Xaa equals any of the naturally occurring L-amino acids
  SITE (57): Xaa equals any of the naturally occurring L-amino acids
  SITE (62): Xaa equals any of the naturally occurring L-amino acids
  SITE (80): Xaa equals any of the naturally occurring L-amino acids
MAXYVGMLRLGXLCAGSSGVLGARAALSRSWQEARLQGVRFLSSREVGSHGLHAHRXASATXRGAPKSILTARLWASAWXPQHRGSQNERPWSSSMKTSG

SEQ ID NO: 1565 - protein, 461 aa, Homo sapiens
  SITE (424): Xaa equals any of the naturally occurring L-amino acids
  SITE (459): Xaa equals any of the naturally occurring L-amino acids
MAVYVGMLRLGRLCAGSSGVLGARAALSRSWQEARLQGVRFLSSREVDRMVSTPIGGLSYVQGCTKKHLNSKTVGQCLETTAQRVPEREALVVLHEDVRLTFAQLKEEVDKAASGLLSIGLCKGDRLGMWGPNSYAWVLMQLATAQAGIILVSVNPAYQAMELEYVLKKVGCKALVFPKQFKTQQYYNVLKQICPEVENAQPGALKSQRLPDLTTVISVDAPLPGTLLLDEVVAAGSTRQHLDQLQYNQQFLSCHDPINIQFTSGTTGSPKGATLSHYNIVNNSNILGERLKLHEKTPEQLRMILPNPLYHCLGSVAGTMMCLMYGATLILASPIFNGKKALEAISRERGTFLYGTPTMFVDILNQPDFSSYDISTMCGGVIAGSPAPPELIRAIINKINMKDLVVAYGTTENSPVTFAHFPEXTPKPLDKEKRAEYASHGGEPLTKTSKSHLPSPSWXGS

SEQ ID NO: 1566 - protein, 177 aa, Homo sapiens
  SITE (121): Xaa equals any of the naturally occurring L-amino acids
  SITE (122): Xaa equals any of the naturally occurring L-amino acids
MKVLATSFVLGSLGLAFYLPLVVTTPKTLAIPEKLQEAVGKVIINATTCTVTCGLGYKEETVCEVGPDGVRRKCQTRRLECLTNWICGMLHFTILIGKEFELSCLSSDILEFGQEAFRFTXXLARGVISTDDEVFKPFQANSHFVKFKYAQEYDSGTYRCDVQLVKNLRLVKSSILG

SEQ ID NO: 1567 - protein, 255 aa, Homo sapiens
MKVLATSFVLGSLGLAFYLPLVVTTPKTLAIPEKLQEAVGKVIINATTCTVTCGLGYKEETVCEVGPDGVRRKCQTQRLECLTNWICGMLHFTILIGKEFELSCLSSDILEFGQEAFRFTWRLARGVISTDDEVFKPFQANSHFVKFKYAQEYDSGTYRCDVQLVKNLRLVKRLYFGLRVLPPNLVNLNFHQSLTEDQKLIDEGLEVNLDSYSKPHHPKWKKKVASALGIGIAIGVVGGVLVRIVLCALRGGLQQ

SEQ ID NO: 1568 - protein, 255 aa, Homo sapiens
MKVLATSFVLGSLGLAFYLPLVVTTPKTLAIPEKLQEAVGKVIINATTCTVTCGLGYKEETVCEVGPDGVRRKCQTRRLECLTNWICGMLHFTILIGKEFELSCLSSDILEFGQEAFRFTWRLARGVISTDDEVFKPFQANSHFVKFKYAQEYDSGTYRCDVQLVKNLRLVKRLYFGLRVLPPNLVNLNFHQSLTEDQKLIDEGLEVNLDSYSKPHHPKWKKKVASALGIGIAIGVVGGVLVRIVLCALRGGLQQ

SEQ ID NO: 1569 - protein, 52 aa, Homo sapiens
  SITE (46): Xaa equals any of the naturally occurring L-amino acids
MVPIFLLKCLLLHVPLCMSSNLSFHSSHHLHIFLPSFSSHLPRPLXIPPLSP

SEQ ID NO: 1570 - protein, 1134 aa, Homo sapiens
VLFRPQAQRPPSCVGGSAVRRWQGQPQPQRPGEEKAAAAILGGPGGGEEEKEEGGGRAWLRLLEELAAARPGEPALMSSSPLSKKRRVSGPDPKPGSNCSPAQSVLSEVPSVPTNGMAKNGSEADIDEGLYSRQLYVLGHEAMKRLQTSSVLVSGLRGLGVEIAKNIILGGVKAVTLHDQGTAQWADLSSQFYLREEDIGKNRAEVSQPRLAELNSYVPVTAYTGPLVEDFLSGFQVVVLTNTPLEDQLRVGEFCHNRGIKLVVADTRGLFGQLFCDFGEEMILTDSNGEQPLSAMVSMVTKDNPGVVTCLDEARHGFESGDFVSFSEVQGMVELNGNQPMEIKVLGPYTFSICDTSNFSDYIRGGIVSQVKVPKKISFKSLVASLAEPDFVVTDFAKFSRPAQLHIGFQALHQFCAQHGRPPRPRNEEDAAELVALAQAVNARALPAVQQNNLDEDLIRKLAYVAAGDLAPINAFIGGLAAQEVMKACSGKFMPIMQWLYFDALECLPEDKEVLTEDKCLQRQNRYDGQVAVFGSDLQEKLGKQKYFLVGAGAIGCELLKNFAMIGLGCGEGGEIIVTDMDTIEKSNLNRQFLFRPWDVTKLKSDTAAAAVRQMNPHIRVTSHQNRVGPDTERIYDDDFFQNLDGVANALDNVDARMYMDRRCVYYRKPLLESGTLGTKGNVQVVIPFLTESYSSSQDPPEKSIPICTLKNFPNAIEHTLQWARDEFEGLFKQPAENVNQYLTDPKFVERTLRLAGTQPLEVLEAVQRSLVLQRPQTWADCVTWACHHWHTQYSNNIRQLLHNFPPDQLTSSGAPFWSGPKRCPHPLTFDVNNPLHLDYVMAAANLFAQTYGLTGSQDRAAVATFLQSVQVPEFTPKSGVKIHVSDQELQSANASVDDSRLEELKATLPSPDKLPGFKMYPIDFEKDDDSNFHMDFIVAASNLRAENYDIPSADRHKSKLIAGKIIPAIATTTAAVVGLVCLELYKVVQGHRQLDSYKNGFLNLALPFFGFSEPLAAPRHQYYNQEWTLWDRFEVQGLQPNGEEMTLKQFLDYFKTEHKLEITMLSQGVSMLYSFFMPAAKLKERLDQPMTEIVSRVSKRKLGRHVRALVLELCCNDESGEDVEVPYVRYTIR

SEQ ID NO: 1571 - protein, 125 aa, Homo sapiens
MVPIFLLKCLLLHVPLCMSSNLSFHSSHHLHIFLPSFSSHLPRPLYIPPLSPFYIFSISPHIFPLCPHLCIPPNFPSIYLFYSPFPPCILCVPPILLYIILPKIFTSPILISPSPLSPNIFISVP

SEQ ID NO: 1572 - protein, 125 aa, Homo sapiens; identical to SEQ ID NO: 1571

SEQ ID NO: 1573 - protein, 124 aa, Homo sapiens
  SITE (63): Xaa equals any of the naturally occurring L-amino acids
  SITE (86): Xaa equals any of the naturally occurring L-amino acids
MVVAVLLGFVAMVLSVVGMKCTRVGDSNPIAKGRVAIAGGALFILAGLCTLTAVSWYATLVTXEFFNPSTPVNARYEFGPALFVGXDSAGLAVLSGSFLCCTCPEPERPNSSPQALSAWTLCCC

SEQ ID NO: 1574 - protein, 97 aa, Homo sapiens
  SITE (49): Xaa equals any of the naturally occurring L-amino acids
NSARDQASGESIHHRTSPSLPRTFLGQLHSGLLHHLPCDHISHHVPRSXERSSASPSSLTLRGKVTETKSDEMTAMYTAVKGREGRNDTNGRELLGN

SEQ ID NO: 1575 - protein, 128 aa, Homo sapiens
MVVAVLLGFVAMVLSVVGMKCTRVGDSNPIAKGRVAIAGGALFILAGLCTLTAVSWYATLVTQEFFNPSTPVNARYEFGPALFVGWASAGLAVLGGSFLCCTCPEPERPNSSPQPYRPGPSAAAREYV

SEQ ID NO: 1576 - protein, 100 aa, Homo sapiens
MVRTRALFYIFFQLSLTSGLIEDSCILIIIYLFFFRWCLALSPMLECSGVTLAHCNHHLLGRLRQENRLNLGGGDCSELRLHHCTLACVTSKTLSHTHTK

SEQ ID NO: 1577 - protein, 100 aa, Homo sapiens; identical to SEQ ID NO: 1576

SEQ ID NO: 1578 - protein, 118 aa, Homo sapiens
CRGDIQIRDKGEAMLRKTLDRAHFTPPNRYIWIYPFSASSFSTIKNVTILNAHKSHSSVTFCECSTIFSFSMTFQPQAEKTVYSLTQRLKRIFYYFKYYTFRTITCLRKLSQNVDLVK

SEQ ID NO: 1579 - protein, 181 aa, Homo sapiens
  SITE (132): Xaa equals any of the naturally occurring L-amino acids
  SITE (139): Xaa equals any of the naturally occurring L-amino acids
  SITE (168): Xaa equals any of the naturally occurring L-amino acids
  SITE (170): Xaa equals any of the naturally occurring L-amino acids
  SITE (181): Xaa equals any of the naturally occurring L-amino acids
MNLSTALLFLNLLFLLDGWITSFNVDGLCIAVAVLLHFFLLATFTWMGLEAIHMYIALVKVFNTYIRRYILKFCIIGWGLPALVVSVVLASRNNNEVYGKESYGKEKGDEFCWIQDPVIFYVTCAGYFGVMXFLNIAMXIVVMVQICGRNGKRSNRTLREEVVRNLRXVXSLTFLVGMTWX

SEQ ID NO: 1580 - protein, 320 aa, Homo sapiens
  SITE (168): Xaa equals any of the naturally occurring L-amino acids
MNLSTALLFLNLLFLLDGWITSFNVDGLCIAVAVLLHFFLLATFTWMGLEAIHMYIALVKVFNTYIRRYILKFCIIGWGLPALVVSVVLASRNNNEVYGKESYGKEKGDEFCWIQDPVIFYVTCAGYFGVMFFLNIAMFIVVMVQICGRNGKRSNRTLREEVLRNLRXVVSLTFLLGMTWGFAFFAWGPLNIPFMYLFSIFNSLQGLFIFIFHCAMKENVQKQWRRHLCCGRFRLADNSDWSKTATNIIKKSSDNLGKSLSSSSIGSNSTYLTSKSKSSSTTYFKRNSHTDNVSYEHSFNKSGSLRQCFHGQVLVKTGPC

SEQ ID NO: 1581 - protein, 131 aa, Homo sapiens
NIFLEWILRRILSLWRGTFLMHGRAGVNRISYWPADPEISLLTEASSSEDAKLDAKAVERLKSNSRAHVCVLLQPLVCYMVQFVEETSYKCDFIQKITKTLPDANTDFYYECKQERIKEYEMLKKKKKKKT

SEQ ID NO: 1582 - protein, 87 aa, Homo sapiens
MTGQIPRLSKVNLFTLLSLWMELFPAEAQRQKSQKNEEGKHGPLGDNEERTRVSTDKRQKTMFCLFENDCKCKALRVMIRSMSRSVP

SEQ ID NO: 1583 - protein, 87 aa, Homo sapiens; identical to SEQ ID NO: 1582

SEQ ID NO: 1584 - protein, 113 aa, Homo sapiens
MSPSPRWGFLCVLFTAVHPAPSTAPVQDKCPVNTWEAMQASSQQLLQTDPRPKPFLLPPLPPLLLISAGTEVSSLVFQKSPLHTQPEGAIKTAGQPTSVHSKVLSKGSLLLGE

SEQ ID NO: 1585 - protein, 94 aa, Homo sapiens [sequence omitted]

SEQ ID NO: 1586 - protein, 133 aa, Homo sapiens
HQAIKPGYSAENVAHTDHTLGCVTIVWCTCWKNSSMLLGDIISVGNMPLTDFFFFLFAVGLGQLIQQSIFFFFLSPNLNRSKMCSGIPGNRCVCKVKNRLFRNSLFRYLHPASHVKYLSLKGLRCTSFISYFS

SEQ ID NO: 1587 - protein, 94 aa, Homo sapiens [sequence omitted]

SEQ ID NO: 1588 - protein, 215 aa, Homo sapiens
  SITE (116): Xaa equals any of the naturally occurring L-amino acids
MELSCPGSRCPVQEQRARWERKRACTARELLETERRYQEQLGLVATYFLGILKAKGTLRPPERQALFGSWELIYGASQELLPYLEGGCWGQGLEGFCRHLELYNQFAANSERSQTXLQEQLKKNKGFRKFVRLQEGRPEFGGLQLQDLLPLPLQRLQQYENLVVALAENTGPNSPDHQQLTRRFLLLGNAGWRLPLLYSFLILTSNNVWYDPIFH

SEQ ID NO: 1589 - protein, 69 aa, Homo sapiens
EILLKKKNQETKSNPTKPQMNQPLTQMRGFGTDKLCAVSMARHLSRLQLCKCGYFYVVYSFYHLFFHWI

SEQ ID NO: 1590 - protein, 211 aa, Homo sapiens
  SITE (21): Xaa equals any of the naturally occurring L-amino acids
  SITE (104): Xaa equals any of the naturally occurring L-amino acids
MSGMTLSSTDMYTVSLLLCLXFKKSDPDPGPFQNNLFHNHGTQSQSCMGSKVGDVIPGAARLISETAQRVHTIGQKQKNDQHLRRVQALLSGRQAKGLTSGRWXLRQGWLLVVPPHGEPRPRMFFLFTDVLLMAKPRPPLHLLRSGTFACKALYPMAQCHLSRVFGHSGGPCGGLLSLSFPREKLLLMSTDQEELSRWYHSLTWAISSQKN

SEQ ID NO: 1591 - protein, 349 aa, Homo sapiens
  SITE (183): Xaa equals any of the naturally occurring L-amino acids
  SITE (191): Xaa equals any of the naturally occurring L-amino acids
  SITE (192): Xaa equals any of the naturally occurring L-amino acids
  SITE (334): Xaa equals any of the naturally occurring L-amino acids
  SITE (344): Xaa equals any of the naturally occurring L-amino acids
  SITE (345): Xaa equals any of the naturally occurring L-amino acids
  SITE (348): Xaa equals any of the naturally occurring L-amino acids
MFLDRPQQWLQLVLLPPALFIPSTENEEQRLASARAVPRNVQPYVVYEEVTNVWINVHDIFYPFPQSEGEDELCFLRANECKTGFCHLYKVTAVLKSQGYDWSEPFSPGEDEFKCPIKEEIALTSGEWEVLARHGSKIWVNEETKLVYFQGTKDTPLEHHLYVVSYEAAGEIVRLTTPGFSHXCSMSQNFXXFVSHITAQVAAASAGNQAGGTEWPAGPSEALCPAQRWPAPRSRCLHRPDAFYPFLNALGFYVRCFLVAETERWWSRASPSSPRLLGGGGHTLMGTGEARRDSEERAAFRLGLPVTSQSPGPASHRPQHPSMQLPVPPGQPPXLDVCVLFGGXXFIXI

SEQ ID NO: 1592 - protein, 144 aa, Homo sapiens
APFLPKPEQRVMRAPQEKRPGPAGGTTCGQPSCPQAFRQALKRTELPRSAGQWRLSPPQPSRPATCVCLTRTHQGFRGWELNHPHLRVIFPSPLPSPPRALPGAGKKKSKKKRKKKKRNKPPLHIMERKYFCRFLFFYNYAWKK

SEQ ID NO: 1593 - protein, 497 aa, Homo sapiens
  SITE (183): Xaa equals any of the naturally occurring L-amino acids
MFLDRPQQWLQLVLLPPALFIPSTENEEQRLASARAVPRNVQPYVVYEEVTNVWINVHDIFYPFPQSEGEDELCFLRANECKTGFCHLYKVTAVLKSQGYDWSEPFSPGEDEFKCPIKEEIALTSGEWEVLARHGSKIWVNEETKLVYFQGTKDTPLEHHLYVVSYEAAGEIVRLTTPGFSHXCSMSQNFDMFVSHYSSVSTPPCVHVYKLSGPDDDPLHKQPRFWASMMEAASCPPDYVPPEIFHFHTRSDVRLYGMIYKPHALQPGKKHPTVLFVYGGPQVQLVNNSFKGIKYLRLNTLASLGYAVVVIDGRGSCQRGLRFEGALKNQMGQVEIEDQVEGLQFVAEKYGFIDLSRVAIHGWSYGGFLSLMGLIHKPQVFKVAIAGAPVTVWMAYDTGYTERYMDVPENNQHGYEAGSVALHVEKLPNEPNRLLILHGFLDENVHFFHTNFLVSQLIRAGKPYQLQIYPNERHSIRCPESGEHYEVTLLHFLQEYL

SEQ ID NO: 1594 - protein, 497 aa, Homo sapiens
MFLDRPQQWLQLVLLPPALFIPSTENEEQRLASARAVPRNVQPYVVYEEVTNVWINVHDIFYPFPQSEGEDELCFLRANECKTGFCHLYKVTAVLKSQGYDWSEPFSPGEDEFKCPIKEEIALTSGEWEVLARHGSKIWVNEETKLVYFQGTKDTPLEHHLYVVSYEAAGEIVRLTTPGFSHSCSMSQNFDMFVSHYSSVSTPPCVHVYKLSGPDDDPLHKQPRFWASMMEAASCPPDYVPPEIFHFHTRSDVRLYGMIYKPHALQPGKKHPTVLFVYGGPQVQLVNNSFKGIKYLRLNTLASLGYAVVVIDGRGSCQRGLRFEGALKNQMGQVEIEDQVEGLQFVAEKYGFIDLSRVAIHGWSYGGFLSLMGLIHKPQVFKVAIAGAPVTVWMAYDTGYTERYMDVPENNQHGYEAGSVALHVEKLPNEPNRLLILHGFLDENVHFFHTNFLVSQLIRAGKPYQLQIYPNERHSIRCPESGEHYEVTLLHFLQEYL

SEQ ID NO: 1595 - protein, 180 aa, Homo sapiens
MTSVSQASLDVSMIIIISLGAICAVLLVIMVLFATRCNREKKDTRSYNCRVAESTYQHHPKRPSRQIHKGDITLVPTINGTLPIRSHHRSSPSSSPTLERGQMGSRQSHNSHQSLNSLVTISSNHVPENFSLELTHATPAVERLSASFNASPGAISAKTKFSRKQIFQELQICPSRHGQI

SEQ ID NO: 1596 - protein, 240 aa, Homo sapiens
MTSVSQASLDVSMIIIISLGAICAVLLVIMVLFATRCNREKKDTRSYNCRVAESTYQHHPKRPSRQIHKGDITLVPTINGTLPIRSHHRSSPSSSPTLERGQMGSRQSHNSHQSLNSLVTISSNHVPENFSLELTHATPAVEVSQLLSMLHQGQYQPRPSFRGNKYSRSYRYALQDMDKFSLKDSGRGDSEAGDSDYDLGRDSPIDRLLGEGFSDLFLTDGRIPASYETLHGGVQGPGTL

SEQ ID NO: 1597 - protein, 447 aa, Homo sapiens
MTSVSQASLDVSMIIIISLGAICAVLLVIMVLFATRCNREKKDTRSYNCRVAESTYQHHPKRPSRQIHKGDITLVPTINGTLPIRSHHRSSPSSSPTLERGQMGSRQSHNSHQSLNSLVTISSNHVPENFSLELTHATPAVEVSQLLSMLHQGQYQPRPSFRGNKYSRSYRYALQDMDKFSLKDSGRGDSEAGDSDYDLGRDSPIDRLLGEGFSDLFLTDGRIPAAMRLCTEECRVLGHSDQCWMPPLPSPSSDYRSNMFIPGEEFPTQPQQQHPHQSLEDDAQPADSGEKKKSFSTFGKDSPNDEDTGDTSTSSLLSEMSSVFQRLLPPSLDTYSECSEVDRSNSLERRKGPLPAKTVGYPQGVAAWAASTHFQNPTTNCGPPLGTHSSVQPSSKWLPAMEEIPENYEEDDFDNVLNHLNDGKHELMDASELVAEINKLLQDVRQS

SEQ ID NO: 1598 - protein, 95 aa, Homo sapiens
  SITE (46): Xaa equals any of the naturally occurring L-amino acids
MTSYILISFVLLIGVGCIEKDQSCPVFGGRKRLHLLFVGGQLRQVXLGAPRPPGGQDPSHQRLGRGELPLVRQHHRDLHHRGPHQEGLQVHHQHE

SEQ ID NO: 1599 - protein, 152 aa, Homo sapiens
  SITE (1): Xaa equals any of the naturally occurring L-amino acids
XPSWWGPRWCRSSCGVARTRVVHPVRVADGLDLALLEVGELPAGHALLAVLVVELHVAARLDPANYPSLLLGDGRHDHLGRGPEVGCPVAEHHAGGLIDASGDGVDGGFHINHRDPFPEDSGFASDALNTAHGIQERSDLQGRPAVTEKTRH

SEQ ID NO: 1600 - protein, 82 aa, Homo sapiens
MRTWASLALGLTRALGGMGSFLLRILGWSWAMGSRSRARWPRGRLGFTSMLSCMRQCSVCRMIMSLVEVLVATSQVVKLWSR

SEQ ID NO: 1601 - protein, 306 aa, Homo sapiens
  SITE (171): Xaa equals any of the naturally occurring L-amino acids
  SITE (180): Xaa equals any of the naturally occurring L-amino acids
  SITE (182): Xaa equals any of the naturally occurring L-amino acids
  SITE (188): Xaa equals any of the naturally occurring L-amino acids
  SITE (208): Xaa equals any of the naturally occurring L-amino acids
  SITE (210): Xaa equals any of the naturally occurring L-amino acids
  SITE (211): Xaa equals any of the naturally occurring L-amino acids
  SITE (218): Xaa equals any of the naturally occurring L-amino acids
  SITE (219): Xaa equals any of the naturally occurring L-amino acids
MALRLLRRAARGAAAAALLRLKASLAADIPRLGYSSSSHHKYIPRRAVLYVPGNDEKKIKKIPSLNVDCAVLDCEDGVAANKKNEARLRIVKTLEDIDLGPTEKCVRVNSVSSGLAEEDLETLLQSRVLPSSLMLPKVESPEEIQWAVCEETLKVGPQVGLFLDAVRFWRXRLSSHIGAXSXKETLDXLYARQKIVVIAKAFGLQAVXLXXIDFRDGXXLLRQSREGAAMGFTGKQVIHPNQIAVVQEQFSPSPEKIKWAEELIAAFKEHQQLGKGAFTFQGSMIDMPLLKQAQNTVTLATSIKEK

SEQ ID NO: 1602 - protein, 92 aa, Homo sapiens
MEDRLLLILVFPLLWFPVAVFQLVLLLPFLLIHSLNCLEWRHLFSAYRVHILAWLAYPCFCVSLRVRHCIELFIQIVLSLPQCCGIGGVPIL

SEQ ID NO: 1603 - protein, 69 aa, Homo sapiens
  SITE (59): Xaa equals any of the naturally occurring L-amino acids
MPTSILLTWHLLTWHLLGCHKTDKSFHVRLDTCQGGVSKLGHRQHPRPGHWVEETVLGXTRREGPGLFP

SEQ ID NO: 1604 - protein, 69 aa, Homo sapiens
MPTSILLTWHLLTWHLLGCHKTDKSFHVRLDTCQGGVSKLGHRQHPRPGHWVEETVLGRSRREGPGLFP

SEQ ID NO: 1605 - protein, 76 aa, Homo sapiens
  SITE (67): Xaa equals any of the naturally occurring L-amino acids
  SITE (74): Xaa equals any of the naturally occurring L-amino acids
MIWRSRAGAELFSLMALWEWIALSLHCWVLAVAAVSDQHATSPFDWLLSDKGPFHRSQEYTDFVDRXRQGFSTXYK

SEQ ID NO: 1606 - protein, 201 aa, Homo sapiens [sequence omitted]

SEQ ID NO: 1607 - protein, 23 aa, Homo sapiens
MSACTATSSWPGPSPPSSARCSS

SEQ ID NO: 1608 - protein, 219 aa, Homo sapiens
  SITE (205): Xaa equals any of the naturally occurring L-amino acids
  SITE (212): Xaa equals any of the naturally occurring L-amino acids
YFSVGQRQCWISFTLTAQNSICCLPCNLRTNTHLLYNPRRGDIKLTQLAMLLAEISSVAHQKDGSFCPIVMCGDFNSVPGSPLYSFIKEGKLNYEGLPIGKVSGQEQSSRGQRILSIPIWPPNLGISQNCVYEVQQVPKVEKTDSDLTQTQLKQTEVLVTAEKLSSNLQHHFSLSSVYSHYFPDTGIPEVTTCHSRSAITVDYIXLLCRKGXCCWAPRS

SEQ ID NO: 1609 - protein, 267 aa, Homo sapiens
MLIAVGIHLLLLMFEVLVCDRVERGTHFWLLVFMPLFFVSPVSVAACVWGFRHDRSLELEILCSVNILQFIFIALKLDRIIHWPWLVVFVPLWILMSFLCLVVLYYIVWSLLFLRSLDVVAEQRRTHVTMAISWITIVVPLLTFEVLLVHRLDGHNTFSYVSIFVPLWLSLLTLMATTFRRKGGNHWWFGIRRDFCQFLLEIFPFLREYGNISYDLHHEDSEDAEETSVPEAPKIAPIFGKKARVVITQSPGKYVPPPPKLNIDMPD

SEQ ID NO: 1610 - protein, 123 aa, Homo sapiens
  SITE (92): Xaa equals any of the naturally occurring L-amino acids
  SITE (93): Xaa equals any of the naturally occurring L-amino acids
  SITE (108): Xaa equals any of the naturally occurring L-amino acids
  SITE (117): Xaa equals any of the naturally occurring L-amino acids
  SITE (122): Xaa equals any of the naturally occurring L-amino acids
MITTAGKVVVTILLGSSGMMLPSLTSSVYFFVFLGLCTWWSWCRTFDPLLFSCLCVLLAIFTAGHLIGLYLYQFQFFQEAVPPNDYYASFGXXEEFFYSTGTELIIPXRLLQAHHNXTYKQXY

SEQ ID NO: 1611 - protein, 52 aa, Homo sapiens
  SITE (37): Xaa equals any of the naturally occurring L-amino acids
PGLRKNRPSVPRRSSPGRISGLSSVAWNPDHSISVFXLAELTSRAQLAVGVS

SEQ ID NO: 1612 - protein, 125 aa, Homo sapiens
MFRRLASVASKLKEFIGNMITTAGKVVVTILLGSSGMMLPSLTSSVYFFVFLGLCTWWSWCRTFDPLLFSCLCVLLAIFTAGHLIGLYLYQFQFFQEAVPPNDYYASFGQSEEFFYSTGTELIIP

SEQ ID NO: 1613 - protein, 107 aa, Homo sapiens
MITTAGKVVVTILLGSSGMMLPSLTSSVYFFVFLGLCTWWSWCRTFDPLLFSCLCVLLAIFTAGHLIGLYLYQFQFFQEAVPPNDYYASFGQSEEFFYSTGTELIIP

SEQ ID NO: 1614 - protein, 115 aa, Homo sapiens
MAVAVLLCGCIVATVSFFWEESLTQHVAGLLFLMTGIFCTISLCTYAASISYDLNRLPKLIYSLPADVEHGYSWSIFCAWCSLGFIVAAGGLCIAYPFISRTKIAQLKSGRDSTV

SEQ ID NO: 1615 - protein, 182 aa, Homo sapiens
  SITE (88): Xaa equals any of the naturally occurring L-amino acids
  SITE (119): Xaa equals any of the naturally occurring L-amino acids
  SITE (120): Xaa equals any of the naturally occurring L-amino acids
  SITE (149): Xaa equals any of the naturally occurring L-amino acids
  SITE (151): Xaa equals any of the naturally occurring L-amino acids
  SITE (154): Xaa equals any of the naturally occurring L-amino acids
MVIYVTLALWPQIIQKKANGNCFWHFGLLLKLGFLLLFICFLAYSQGAFEKIFSLWPLSKCFELKGNVYEWWFRWRLDRYVVFHGMLXAFIYLALQKRQILSEGKGEPLFSNKISNFLXXISVVSFLTYSIWASSCKNKAECNELHPSXSXVQXLAFILIRNIPGYARQFTVHFLLGLEKFH

SEQ ID NO: 1616 - protein, 83 aa, Homo sapiens
  SITE (17): Xaa equals any of the naturally occurring L-amino acids
  SITE (18): Xaa equals any of the naturally occurring L-amino acids
IWAIDVFAFCLIFFYKXXVRGIHLFICCTDLIMILMFERLHLFAFTICGVKYIFCSQYMKIWSNLNSKQTFCGCLFLYWQSIN

SEQ ID NO: 1617 - protein, 182 aa, Homo sapiens
  SITE (119): Xaa equals any of the naturally occurring L-amino acids
  SITE (120): Xaa equals any of the naturally occurring L-amino acids
  SITE (149): Xaa equals any of the naturally occurring L-amino acids
  SITE (151): Xaa equals any of the naturally occurring L-amino acids
  SITE (154): Xaa equals any of the naturally occurring L-amino acids
MVIYVTLALWPQIIQKKANGNCFWHFGLLLKLGFLLLFICFLAYSQGAFEKIFSLWPLSKCFELKGNVYEWWFRWRLDRYVVFHGMLFAFIYLALQKRQILSEGKGEPLFSNKISNFLXXISVVSFLTYSIWASSCKNKAECNELHPSXSXVQXLAFILIRNIPGYARQFTVHFLLGLEKFH

SEQ ID NO: 1618 - protein, 95 aa, Homo sapiens
MRSQHITWCLLFSSPLATLPAALPLGACAAVFTVIGSEKQSECSLLRESRAKYHGCTHGQISSSLKQHPRWMYSHQEDLKVWSLVEKKQKQCMGD

SEQ ID NO: 1619 - protein, 95 aa, Homo sapiens; identical to SEQ ID NO: 1618

SEQ ID NO: 1620 - protein, 706 aa, Homo sapiens
MLHALQHPCIVALIGISIHPLCFALELAPLSSLNTVLSENARDSSFIPLGHMLTQKIAYQIASGLAYLHKKNIIFCDLKSDNILVWSLDVKEHINIKLSDYGISRQSFHEGALGVEGTPGYQAPEIRPRIVYDEKVDMFSYGMVLYELLSGQRPALGHHQLQIAKKLSKGIRPVLGQPEEVQFRRLQALMMECWDTKPEKRPLALSVVSQMKDPTFATFMYELCCGKQTAFFSSQGQEYTVVFWDGKEESRNYTVVNTEKGLMEVQRMCCPGMKVSCQLQVQRSLWTATEDQKIYIYTLKGMCPLNTPQQALDTPAVVTCFLAVPVIKKNSYLVLAGLADGLVAVFPVVRGTPKDSCSYLCSHTANRSKFSIADEDARQNPYPVKAMEVVNSGSEVWYSNGPGLLVIDCASLEICRRLEPYMAPSMVTSVVCSSEGRGEEVVWCLDDKANSLVMYHSTTYQLCARYFCGVPSPLRDMFPVRPLDTEPPAASHTANPKVPEGDSIADVSIMYSEELGTQILIHQESLTDYCSMSSYSSSPPRQAARSPSSLPSSPASSSSVPFSTDCEDSDMLHTPGAASDRSEHDLTPMDGETFSQHLQAVKILAVRDLIWVPRRGGDVIVIGLEKDSEAQRGRVIAVLKARELTPHGVLVDAAVVAKDTVVCTFENENTEWCLAVWRGWGAREFDIFYQSYEELGRLEACTRKRR

SEQ ID NO: 1621 - protein, 706 aa, Homo sapiens [sequence omitted]

SEQ ID NO: 1622 - protein, 196 aa, Homo sapiens
  SITE (171): Xaa equals any of the naturally occurring L-amino acids
  SITE (175): Xaa equals any of the naturally occurring L-amino acids
  SITE (177): Xaa equals any of the naturally occurring L-amino acids
  SITE (181): Xaa equals any of the naturally occurring L-amino acids
  SITE (185): Xaa equals any of the naturally occurring L-amino acids
  SITE (188): Xaa equals any of the naturally occurring L-amino acids
  SITE (189): Xaa equals any of the naturally occurring L-amino acids
  SITE (193): Xaa equals any of the naturally occurring L-amino acids
MSLLVDGDMNLSIIMTISSTLLALVLMPLCLWIYSWAWINTPIVQLLPLGTVTLTLCSTLIPIGLGVFIRYKYSRVADYIVKVSLWSLLVTLVVLFIMTGTMLGPELLASIPAAVYVIAIFMPLAGYASGYGLATLFHLPPNCKRTVCLETGSQNVQLCTAILKLAFHRIXRKHXHXSFAXCTFXVCXXGDFXFNL

SEQ ID NO: 1623 - protein, 69 aa, Homo sapiens [sequence omitted]

SEQ ID NO: 1624 - protein, 199 aa, Homo sapiens
FSGVCFAGIAGSMATLLHDAVMNPAEVVKQRLQMYNSQHRSAISCIRTVWRTEGLGAFYRSYTTQLTMNIPFQSIHFITYEFLQEQVNPHRTYNPQSHIISGGLAGALAAAATTPLDVCKTLLNTQENVALSLANISGRLSGMANAFRTVYQLNGLAGYFKGIQARVIYQMPSTAISWSVYEFFKYFLTKRQLENRAPY

SEQ ID NO: 1625 - protein, 69 aa, Homo sapiens [sequence omitted]

SEQ ID NO: 1626 - protein, 91 aa, Homo sapiens
  SITE (84): Xaa equals any of the naturally occurring L-amino acids
MARVLQLEPQTSACLLSLLCPALQEPGPASGTESAHFLRAHSRCGPGLPPPHVSSPQPTPPGPEAKVRGCMGARWWLGRAPGVXGVFRDTT

SEQ ID NO: 1627 - protein, 137 aa, Homo sapiens
  SITE (15): Xaa equals any of the naturally occurring L-amino acids
  SITE (39): Xaa equals any of the naturally occurring L-amino acids
AHCHISRSHCPTLRXKDTCGGWEPTSALGSSTLSHVPHXLLERRDLWRREAEARKQSQPDPAMPPGHTRMPENQRLETLTKLLQSQSQLLRELVLLPAGADSLRAQSHRAELDRKLVQVEEAIKIFSRPKVFVKMDD

SEQ ID NO: 1628 - protein, 95 aa, Homo sapiens
MAWAPACVQAQGLSCLCLFPDPSSCREWCCPLGMYLQVETRTSSRLHLKRAPGIRSWSLLVGKALHVPPQNPRTGSLTFKKDENETKYFLFFLLP

SEQ ID NO: 1629 - protein, 189 aa, Homo sapiens
  SITE (81): Xaa equals any of the naturally occurring L-amino acids
  SITE (163): Xaa equals any of the naturally occurring L-amino acids
VQLSVPAGMLHSLCVQLFITAGSLCATHSQCLSKADGARPSILYLTCPLHSPIKNGPQIRVEEADVSSSETALPRSRRDGXAKPGCETGCCMWLQALNIVTWRLPQHIVRSKPQEPEQQNSCHPQKPAPGTAVQIGRRSSQQWLLRTPLTQQRSPDACRSPEXALSALDMAGDTQVWPSQSLFAKLKVK

SEQ ID NO: 1630 - protein, 95 aa, Homo sapiens; identical to SEQ ID NO: 1628

SEQ ID NO: 1631 - protein, 303 aa, Homo sapiens
  SITE (224): Xaa equals any of the naturally occurring L-amino acids
  SITE (245): Xaa equals any of the naturally occurring L-amino acids
  SITE (250): Xaa equals any of the naturally occurring L-amino acids
  SITE (252): Xaa equals any of the naturally occurring L-amino acids
  SITE (255): Xaa equals any of the naturally occurring L-amino acids
  SITE (256): Xaa equals any of the naturally occurring L-amino acids
  SITE (257): Xaa equals any of the naturally occurring L-amino acids
  SITE (287): Xaa equals any of the naturally occurring L-amino acids
  SITE (301): Xaa equals any of the naturally occurring L-amino acids
MAAASAGATRLLLLLLMAVAAPSRARGSGCRAGTGARGAGAEGREGEACGTVGLLLEHSFEIDDSANFRKRGSLLWNQQDGTLSLSQRQLSEEERGRLRDVAALNGLYRVRIPRRPGALDGLEAGGYVSSFVPACSLVESHLSDQLTLHVDVAGNVVGVSVVTHPGGCRGHEVEDVDLELFNTSVQLQPPTTAPGPETAAFIERLEMEQAQKAKNPQEQKSFFXKYWMYIIPVVLFLMMSGAPDXGGQGXGXGGXXXGVVAGEGPSLSAFPSCKTQGGFPFCLEFPXCSSSPSPKKGFCLXPL

SEQ ID NO: 1632 - protein, 173 aa, Homo sapiens
  SITE (99): Xaa equals any of the naturally occurring L-amino acids
  SITE (118): Xaa equals any of the naturally occurring L-amino acids
  SITE (141): Xaa equals any of the naturally occurring L-amino acids
  SITE (164): Xaa equals any of the naturally occurring L-amino acids
  SITE (170): Xaa equals any of the naturally occurring L-amino acids
  SITE (172): Xaa equals any of the naturally occurring L-amino acids
  SITE (173): Xaa equals any of the naturally occurring L-amino acids
MAAASAGATRLLLLLLMAVAAPSRARGSGCRAGTGARGAGAEGREGEACGTVGLLLEHSFEIDDSANFRKRGSLLWNQQDGTLSLSQRQLSEEERGRLXDVAALNGLYRVRIPRRPGXLDGLEAGGYVSSFVPACSLVESXLSDQLTLHVDVAGNVVGRVGGDXPWGCRXHXX

SEQ ID NO: 1633 - protein, 158 aa, Homo sapiens
MAAASAGATRLLLLLLMAVAAPSRARGSGCRAGTGARGAGAEGREGEACGTVGLLLEHSFEIDDSANFRKRGSLLWNQQDGTLSLSQRQLSEEERGRLRDVAASYLDCGATRACGPLLCATLPVSLFKNIDDTLKCVNVLKSYSFQQPKATVVLARRS

SEQ ID NO: 1634 - protein, 158 aa, Homo sapiens; identical to SEQ ID NO: 1633

SEQ ID NO: 1635 - protein, 115 aa, Homo sapiens
MRSRKIPQQSRFFTPLFFLNLPILVVPLPSTDTSCSDFQYQVFKTSYPPSSVPPSLQSHKHWCSQIKISPKQCQRDPLSSFQARDMFSFQVLEKTGSMFTWNFSRGGAISFCIKL

SEQ ID NO: 1636 - protein, 115 aa, Homo sapiens; identical to SEQ ID NO: 1635

SEQ ID NO: 1637 - protein, 80 aa, Homo sapiens
MALGSMYLVLTLIVAKVLRGAEPCCGPLKNRVLRPCPLPVHCPLPIPSPAEGIPWVAYLPIRWFISCCPGHCIQIPMCTS

SEQ ID NO: 1638 - protein, 80 aa, Homo sapiens; identical to SEQ ID NO: 1637

SEQ ID NO: 1639 - protein, 81 aa, Homo sapiens
MRTNQSLCSFLLWSVPFHQAACPQAKDHPLEPSMHPEGTQLQSCSTMLGPRQLSSEKQPLLPPRSHLKSSPMLRACKGLTS

SEQ ID NO: 1640 - protein, 81 aa, Homo sapiens; identical to SEQ ID NO: 1639

SEQ ID NO: 1641 - protein, 53 aa, Homo sapiens
  SITE (52): Xaa equals any of the naturally occurring L-amino acids
MVFLSHLFGTKRLFLLLALIWASWHFSYMPADAWVDPGIPDRYLQAYLSIVXP

SEQ ID NO: 1642 - protein, 61 aa, Homo sapiens
MHVVHWSRLFLLKPPYSVHATFIPTGFLARFRTPGILDSCFFHSWPLLLSYFLSPQSPLLK

SEQ ID NO: 1643 - protein, 86 aa, Homo sapiens
MLTAVKMFRLSAVTLCAFSLTLHSGVQLCEQLVLRIALFQNCRAEDGFGLRVCWRRLMRSFCRSAKFWGSNDLRTWGSRFLWKDCT

SEQ ID NO: 1644 - protein, 86 aa, Homo sapiens; identical to SEQ ID NO: 1643

SEQ ID NO: 1645 - protein, 122 aa, Homo sapiens
  SITE (116): Xaa equals any of the naturally occurring L-amino acids
MGLLAFLKTQFVLHLLVGFVFVVSGLVINFVQLCTLALWPVSKQLYRRLNCRLAYSLWSQLVMLLEWWSCTECTLFTDQATVERFGKEHAIIILNHNFEIDFLCGWTMCERFGMLXSSKGPR

SEQ ID NO: 1646 - protein, 121 aa, Homo sapiens
GDFLWKTSRVDEKEAAQWLHKLYQEKDALQEIYNQKGMFPGEQFKPARRPWTLLNFLSWATILLSPLFSFVLGVFASGSPLLILTFLGFVGAASFGVRRLIGVTEIEKGSSYGNQEFKKKE

SEQ ID NO: 1647 - protein, 376 aa, Homo sapiens
  SITE (30): Xaa equals any of the naturally occurring L-amino acids
MGLLAFLKTQFVLHLLVGFVFVVSGLVINXVQLCTLALWPVSKQLYRRLNCRLAYSLWSQLVMLLEWWSCTECTLFTDQATVERFGKEHAVIILNHNFEIDFLCGWTMCERFGVLGSSKVLAKKELLYVPLIGWTWYFLEIVFCKRKWEEDRDTVVEGLRRLSDYPEYMWFLLYCEGTRFTETKHRVSMEVAAAKGLPVLKYHLLPRTKGFTTAVKCLRGTVAAVYDVTLNFRGNKNPSLLGILYGKKYEADMCVRRFPLEDIPLDEKEAAQWLHKLYQEKDALQEIYNQKGMFPGEQFKPARRPWTLLNFLSWATILLSPLFSFVLGVFASGSPLLILTFLGFVGAASFGVRRLIGVTEIEKGSSYGNQEFKKKE

SEQ ID NO: 1648 - protein, 164 aa, Homo sapiens
  SITE (76): Xaa equals any of the naturally occurring L-amino acids
  SITE (112): Xaa equals any of the naturally occurring L-amino acids
  SITE (146): Xaa equals any of the naturally occurring L-amino acids
MRTLVELGPWAGDFGPDLLLTLLFLLFLAHGVTLDGASANPTVSLQEFLMAEQSLPGTLLKLAAQGLGMQAACTLXRLCWAWELSDLHLLQSLMAQSCSSALRTSVPHGALXEAACTFCFHLTLLHLRHSPPAYSGPAVALLVTVXAYTAGPYVCFFNPALAAL

SEQ ID NO: 1649 - protein, 186 aa, Homo sapiens
MRTLVELGPWAGDFGPDLLLTLLFLLFLAHGVTLDGASANPTVSLQEFLMAEQSLPGTLLKLAAQGLGMQAACTLMRLCWAWELSDLHLLQSLMAQSCSSALRTSVPHGALLEAACTFCFHLTLLHLRHSPPAYSGPAVALLVTVTAYTAGPFTSAFFNPALAASVTFACSDTPYWSTCRCTGWAL

SEQ ID NO: 1650 - protein, 206 aa, Homo sapiens
  SITE (200): Xaa equals any of the naturally occurring L-amino acids
MVRLAAELLLLLGLLLLTLHITVLRGSGAADGPDAAAGNASQAQLQNNLNVGSDTTSETSFSLSKEAPREHLDHQAAHQPFPRPRFRQETGHPSLQRDFPRSFLLDLPNFPDLSKADINGQNPNIQVTIEVVDGPDSEADKDQHPENKPSWSVPSPDWRAWWQRSLSLARANSGDQDYQYDSTSDDSNFLNPPRGWDHTXPGHRDF

SEQ ID NO: 1651 - protein, 107 aa, Homo sapiens
  SITE (52): Xaa equals any of the naturally occurring L-amino acids
HFSKGKQQNKWEKDNGPHFTYFNTILTIFSSTNISPINKYKRGGGSIWGILXFYVLRKQKKLHYFCKVFIESRIIVHQAIVNMTWSYGVELRKNKVGSYSIFYFAKF

SEQ ID NO: 1652 - protein, 464 aa, Homo sapiens
MVRLAAELLLLLGLLLLTLHITVLRGSGAADGPDAAAGNASQAQLQNNLNVGSDTTSETSFSLSKEAPREHLDHQAAHQPFPRPRFRQETGHPSLQRDFPRSFLLDLPNFPDLSKADINGQNPNIQVTIEVVDGPDSEADKDQHPENKPSWSVPSPDWRAWWQRSLSLARANSGDQDYKYDSTSDDSNFLNPPRGWDHTAPGHRTFETKDQPEYDSTDGEGDWSLWSVCSVTCGNGNQKRTRSCGYACTATESRTCDRPNCPGIEDTFRTAATEVSLLAGSEEFNATKLFEVDTDSCERWMSCKSEFLKKYMHKVMNDLPSCPCSYPTEVAYSTADIFDRIKRKDFRWKDASGPKEKLEIYKPTARYCIRSMLSLESTTLAAQHCCYGDNMQLITRGKGAGTPNLISTEFSAELHYKVDVLPWIICKGDWSRYNEARPPNNGQKCTESPSDEDYIKQFQEAREY

SEQ ID NO: 1653 - protein, 158 aa, Homo sapiens [sequence omitted]

SEQ ID NO: 1654 - protein, 106 aa, Homo sapiens
  SITE (26): Xaa equals any of the naturally occurring L-amino acids
PTFSDQYLAPHPYSPQPPPYHELPHXHGQSQRVLCGCYVAHCGARLGRALLVCDWVSWPSCACSYSAWAQPTSCCHTGDCGHCDSHQQCLVPPPSLRGRQGTFDYF

SEQ ID NO: 1655 - protein, 158 aa, Homo sapiens [sequence omitted]

SEQ ID NO: 1656 - protein, 66 aa, Homo sapiens
MHRPEAMLLLLTLALLGGPTWAGKMYGPGGGKYFSTTEDYDHEITGLRVSVGLLLVKRFLEGVIYE

SEQ ID NO: 1657 - protein, 178 aa, Homo sapiens
MHRPEAMLLLLTLALLGGPTWAGKMYGPGGGKYFSTTEDYDHEITGLRVSVGLLLVKSVQVKLGDSWDVKLGALGGNTQEVTLQPGEYITKVFVAFQAFLRGMVMYTSKDRYFYFGKLDGQISSAYPSQEGQVLVGIYGQYQLLGIKSIGFEWNYPLEEPTTEPPVNLTYSANSPVGR

SEQ ID NO: 1658 - protein, 112 aa, Homo sapiens
  SITE (12): Xaa equals any of the naturally occurring L-amino acids
  SITE (52): Xaa equals any of the naturally occurring L-amino acids
  SITE (64): Xaa equals any of the naturally occurring L-amino acids
  SITE (67): Xaa equals any of the naturally occurring L-amino acids
  SITE (68): Xaa equals any of the naturally occurring L-amino acids
MTFCLFVLFCLXWSLALLPRVECSGAISAHCNLHLPGSGGFSCLSLLSSWDXRHAPPCPDNFCXFSXXGVSLCWQAGLEHLTRGPPASASQSTGITGVSHPAWPRMTFKRSN

SEQ ID NO: 1659 - protein, 122 aa, Homo sapiens
MTTASSLISPFFPLPPPAHFSQCRMTFCLFVLFCLRWSLALLPRVECSGAISAHCNLHLPGSSGFSCLSLLSSWDYRHAPPCPDNFCIFSRDGVSLCWPGWSRTPDLVVHPPRPPKALGLQA

SEQ ID NO: 1660 - protein, 65 aa, Homo sapiens
  SITE (24): Xaa equals any of the naturally occurring L-amino acids
MCKGLKNPEGLLLLLLLLLFTDTXNSHCLPPYLSCFLHERQPELQSVCISAAYVLAPLQNPVSSL

SEQ ID NO: 1661 - protein, 299 aa, Homo sapiens
  SITE (172): Xaa equals any of the naturally occurring L-amino acids
  SITE (174): Xaa equals any of the naturally occurring L-amino acids
GGEEEGEEGAEISGLGAGRRSAPIAVGLGFLGVGGRGGSDMEANGSQGTSGSANDSQHDPGKMFIGGLSWQTSPDSLRDYFSKFGEIRECMVMRDPTTKRSRGFGFVTFADPASVDKVLGQPHHELDSKTIDPKVAFPRRAQPKMVTRTKKIFVGGLSANTVVEDVKQYFEXFXKVEDAMLMFDKTTNRHRGFGFVTFENEDVVEKVCEIHFHEINNKMVECKKAQPKEVMFPPGTRGRARGLPYTMDAFMLGMGMLGESGQDRRSPWTGRAMEASTPNWVTYQWGKLLHLSKPQFPCL

SEQ ID NO: 1662 - protein, 97 aa, Homo sapiens [sequence omitted]

SEQ ID NO: 1663 - protein, 86 aa, Homo sapiens
  SITE (71): Xaa equals any of the naturally occurring L-amino acids
MLAAAPLHEQKQMIGTCYLVLKRWSDWMVLSFLPLLLSCDFEGSVSTPLSMMSTPSWLARSRACCWRLTTXSCCSCWSLQNPSMPR

SEQ ID NO: 1664 - protein, 86 aa, Homo sapiens; identical to SEQ ID NO: 1663
  SITE (71): Xaa equals any of the naturally occurring L-amino acids

SEQ ID NO: 1665 - protein, 49 aa, Homo sapiens
MKHSFLSSDLIWCVLSLLCLGVWFRETWTTLFGRTGLPRNQQCPRRKGL

SEQ ID NO: 1666 - protein, 49 aa, Homo sapiens; identical to SEQ ID NO: 1665

SEQ ID NO: 1667 - protein, 142 aa, Homo sapiens
  SITE (69): Xaa equals any of the naturally occurring L-amino acids
  SITE (76): Xaa equals any of the naturally occurring L-amino acids
  SITE (90): Xaa equals any of the naturally occurring L-amino acids
  SITE (108): Xaa equals any of the naturally occurring L-amino acids
MYVTLVFRVKGSRLVKPSLCLALLCPAFLVGVVRVAEYRNHWSDVLAGFLTGAAIATFLVTCVVHNFQXRPPSGRXLSPQSAYPRLPGPXFPHLHNGGDHPCPAGCRXGCESSAWMQPGGSHRAAFTGLALPWAGGRPHPKR

SEQ ID NO: 1668 - protein, 110 aa, Homo sapiens
MYVTLVFRVKGSRLVKPSLCLALLCPAFLVGVVRVAEYRNHWSDVLAGFLTGAAIATFLVTCVVHNFQSRPPSGRRLSPQSAYPRLPGPQFPHLHNGGDHPCPAGCQERL

SEQ ID NO: 1669 - protein, 159 aa, Homo sapiens [sequence omitted]

SEQ ID NO: 1670 - protein, 110 aa, Homo sapiens
MRWPCPTSKPAPPPVLWSHLCQHRWGLTPASTLLCWLLLFNLGTCLSFSHLKQNNNNSNTSKISFDPASLCWVIISLSFPPFPSKHLKRVVYTQHSPFPHYPLTPQPAAI

SEQ ID NO: 1671 - protein, 382 aa, Homo sapiens
GPERGRYYPKSHKNVDLNDVLVPKPFSQFWQPLLRGLHSQNFTQALLERMLSELPALGISGIRPTYILRWTVELIVANTKTGRNARRFSAGQWEARRGWRLFNCSASLDWPRMVESCLGSPCWASPQLLRIIFKAMGQGLPDEEQEKLLRICSIYTQSGENSLVQEGSEASPIGKSPYTLDSLYWSVKPASSSFGSEAKAQQQEEQGSVNDVKEEEKEEKEVLPDQVEEEEENDDQEEEEEDEDDEDDEEEDRMEVGPFSTGQESPTAENARLLAQKRGALQGSAWQVSSEDVRWDTFPLGRMPGQTEDPAELMLENYDTMYLLDQPVLEQRLEPSTCKTDTLGLSCGVGSGNCSNSSSSNFEGLLWSQGQLHGLKTGLQLF

SEQ ID NO: 1672 - protein, 110 aa, Homo sapiens; identical to SEQ ID NO: 1670

SEQ ID NO: 1673 - protein, 156 aa, Homo sapiens
  SITE (92): Xaa equals any of the naturally occurring L-amino acids
  SITE (114): Xaa equals any of the naturally occurring L-amino acids
  SITE (122): Xaa equals any of the naturally occurring L-amino acids
  SITE (134): Xaa equals any of the naturally occurring L-amino acids
MLQGHSSVFQALLGTFFTWGMTAAGAALVFVFSSGQRRILDGSLGFAAGVMLAASYWSLLAPAVEMATSSGGFGAFAFFPVAVGFTLGAAFXYLADLLMPHLGAAEDPQTALAXNFGSTLMXKKSDPEGPALLXPESELFIRIGRLASFSSSLLQH

SEQ ID NO: 1674 - protein, 167 aa, Homo sapiens
  SITE (140): Xaa equals any of the naturally occurring L-amino acids
MLQGHSSVFQALLGTFFTWGMTAAGAALVFVFSSGQRRILDGSLGFAAGVMLAASYWSLLAPAVEMATSSGGFGAFAFFPVAVGFTLGAAFVYLADLLMPHLGAAEDPQTALALNFGSTLMKKKSDPEGHALLFPERIHXIDKSENGEAYQRKKAAATGLPEGPAVP

SEQ ID NO: 1675 - protein, 204 aa, Homo sapiens
MFQFLSQGFYCGVGLFTRFLKLLGALLLLALALFLGFLQLGWRFLVGLGDRLGWRDKATWLFSWLDSPALQRCLTLLRDSRPWQRLVRIVQWGWLELPWVKQNINRQGNAPVASGRYCQPEEEVARLLTMAGVPEDELNPFHVLGVEATASDVELKKAYRQLAVMVHPDKNHHPRAEEAFKVFASSLGTLSAMLKKRKGVWRLK

SEQ ID NO: 1676 - protein, 412 aa, Homo sapiens
MGVWTGRLGGWAQVMFQFLSQGFYCGVGLFTRFLKLLGALLLLALALFLGFLQLGWRFLVGLGDRLGWRDKATWLFSWLDSPALQRCLTLLRDSRPWQRLVRIVQWGWLELPWVKQNINRQGNAPVASGRYCQPEEEVARLLTMAGVPEDELNPFHVLGVEATASDVELKKAYRQLAVMVHPDKNHHPRAEEAFKVLRAAWDIVSNAEKRKEYEMKRMAENELSRSVNEFLSKLQDDLKEAMNTMMCSRCQGKHRRFEMDREPKSARYCAECNRLHPAEEGDFWAESSMLGLKITYFALMDGKVYDITQWAGCQRVGISPDTHRVPYHISFGSRIPGTRGRQRATPDAPPADLQDFLSRIFQVPPGQMPNGNFFAAPQPAPGAAAASKPNSTVPKGEAKPKRRKKVRRPFQR

SEQ ID NO: 1677 - protein, 122 aa, Homo sapiens
  SITE (119): Xaa equals any of the naturally occurring L-amino acids
MALFRCVWSVLSALGKSGSDLCAGCGSRLRSPFSFAYVPRCFSSTANSYPKKPLTSYVRFSKEQLPIFKAQNPDAKNSELIRKIAQLWRELPDSEKKIYEDAYRADLAGHTKKEINRIXEPG

SEQ ID NO: 1678 - protein, 246 aa, Homo sapiens
MALFRCVWSVLSALGKSGSDLCAGCGSRLRSPFSFAYVPRCFSSTANSYPKKPLTSYVRFSKEQLPIFKAQNPDAKNSELIRKIAQLWRELPDSEKKIYEDAYRADWQAYKEEINRIQEQLTPSQIVSLEKEIQQKRLKKKALIKKRELTMLGKPKRPRSAYNIFIAERFQETKDGTSQVKLKTINENWKNLSSSQKQVYIQLANDDKIRYYNEMKSWEEQMMEVGRKDLLRRTVKHQRKVDPEEY

SEQ ID NO: 1679 - protein, 495 aa, Homo sapiens
  SITE (330): Xaa equals any of the naturally occurring L-amino acids
  SITE (333): Xaa equals any of the naturally occurring L-amino acids
MSMLVVFLLLWGVTWGPVTEAAIFYETQPSLWAESESLLKPLANVTLTCQARLETPDFQLFKNGVAQEPVHLDSPAIKHQFLLTGDTQGRYRCRSGLSTGWTQLSKLLELTGPKSLPAPWLSMAPVSWITPGLKTTAVCRGVLRGVTFLLRREGDHEFLEVPEAQEDVEATFPVHQPGNYSCSYRTDGEGALSEPSATVTIEELAAPPPPVLMHHGESSQVLHPGNKVTLTCVAPLSGVDFQLRRGEKELLVPRSSTSPDRIFFHLNAVALGDGGHYTCRYRLHDNQNGWSGDSAPVELILSDETLPAPEFSPEPESGRALRLRCLAPLXGAXFALVREDRGGRRVHRFQSPAGTEALFELHNISVADSANYSCVYVDLKPPFGGSAPSERLELHVDGPPPRPQLRATWSGAVLAGRDAVLRCEGPIPDVTFELLREGETKAVKTVRTPGAAANLELIFVGPQHAGNYRCRYRSWVPHTFESELSDPVELLVAES

SEQ ID NO: 1680 - protein, 495 aa, Homo sapiens
MSMLVVFLLLWGVTWGPVTEAAIFYETQPSLWAESESLLKPLANVTLTCQARLETPDFQLFKNGVAQEPVHLDSPAIKHQFLLTGDTQGRYRCRSGLSTGWTQLSKLLELTGPKSLPAPWLSMAPVSWITPGLKTTAVCRGVLRGVTFLLRREGDHEFLEVPEGQEDVEATFPVHQPGNYSCSYRTDGEGALSEPSATVTIEELAAPPPPVLMHHGESSQVLHPGNKVTLTCVAPLSGVDFQLRRGEKELLVPRSSTSPDRIFFHLNAVALGDGGHYTCRYRLHDNQNGWSGDSAPVELILSDETLPAPEFSPEPESGRALRLRCLAPLEGARFALVREDRGGRRVHRFQSPAGTEALFELHNISVADSANYSCVYVDLKPPFGGSAPSERLELHVDGPPPRPQLRATWSGAVLAGRDAVLRCEGPIPDVTFELLREGETKAVKTVRTPGAAANLELIFVGPQHAGNYRCRYRSWVPHTFESELSDPVELLVAES

SEQ ID NO: 1681 - protein, 153 aa, Homo sapiens
MLKDFSNLLLVVLCDYVLGEAEYLLLREPGHVALSNDTVYVDFQYFDGANGTLRNVSVLLLEANTNQTVTTKYLLTNQSQGTLKFECFYFKEAGDYWFTMTPEATDNSTPFPWWEKSAFLKVEWPVFHVDLNRSAKAAEGTFQVGLFTSQPLC

SEQ ID NO: 1682 - protein, 78 aa, Homo sapiens
SSPTSPKDNYQRVSSLSPSQCRKDKCQSFPTHPEFAFYDNTSFGLTEAEQRMLDLPGYFGSNEEDETTSTLSVEKLVI

SEQ ID NO: 1683 - protein, 490 aa, Homo sapiens
MGKNKYCFDFGISSRSHFSAKEECMLIQRNTAFQPSSPSPLQPQGPVKSNNIVTVTGISLCLFIIIATVLITLWRRFGRPAKCSTPARHNSIHSPSFRKNSDEENICELSEQRGSFSDGGDGPTGSPGDTGIPLTYRRSGPVPPEDDASGSESFQSNAQKIIPPLFSYRLAQQQLKEMKKKGLTETTKVYHVSQSPLTDTAIDAAPSAPLDLESPEEAAANKFRIKSPFPEQPAVSAGERPPSRLDLNVTQASCAISPSQTLIRKSQARHVGSRGGPSERSHARNAHFRRTASFHEARQARPFRERSMSTLTPRQAPAYSSRTRTCEQAEDRFRPQSRGAHLFPEKLEHFQEASGTRGPLNPLPKSYTLGQPLRKPDLGDHQAGLVAGIERTEPHRARRGPSPSHKSVSRKQSSPISPKDNYQRVSSLSPSQCRKDKCQSFPTHPEFAFYDNTSFGLTEAEQRMLDLPGYFGSNEEDETTSTLSVEKLVI

SEQ ID NO: 1684 - protein, 178 aa, Homo sapiens
  SITE (123): Xaa equals any of the naturally occurring L-amino acids
  SITE (175): Xaa equals any of the naturally occurring L-amino acids
MAMVPGATLRRLLSVVLPTASQPQLLALLDSATERHVDHAAESDGGAEQADVGRRRKHQSWWQALDGKLRGDLISRGLEKMLWARKRKQSILKKTCLPLRERMIFSGKGSWPHLSLEPIGELXPVPIVGAETIDLLNTGEKLFIFRNPKEPEISLHVPPRKKKNFLNAKKAMRAXGMD

SEQ ID NO: 1685 - protein, 200 aa, Homo sapiens [sequence omitted]

SEQ ID NO: 1686 - protein, 419 aa, Homo sapiens
MSCAGRAGPARLAALALLTCSLWPARADNASQEYYTALINVTVQEPGRGAPLTFRIDRGRYGLDSPKAEVRGQVLAPLPLHGVADHLGCDPQTRFFVPPNIKQWIALLQRGNCTFKEKISRAAFHNAVAVVIYNNKSKEEPVTMTHPGTGDIIAVMITELRGKDILSYLEKNISVQMTIAVGTRMPPKNFSRGSLVFVSISFIVLMIISSAWLIFYFIQKIRYTNARDRNQRRLGDAAKKAISKLTTRTVKKGDKETDPDFDHCAVCIESYKQNDVVRILPCKHVFHKSCVDPWLSEHCTCPMCKLNILKALGIVPNLPCTDNVAFDMERLTRTQAVNRRSALGDLAGDNSLGLEPLRTSGISPLPQDGELTPRTGEINIAVTKEWFIIASFGLLSALTLCYMIIRATASLNANEVEWF

SEQ ID NO: 1687 - protein, 419 aa, Homo sapiens; identical to SEQ ID NO: 1686

SEQ ID NO: 1688 - protein, 143 aa, Homo sapiens
  SITE (120): Xaa equals any of the naturally occurring L-amino acids
  SITE (142): Xaa equals any of the naturally occurring L-amino acids
MAFSKLLEQAGGVGLFQTLQVLTFILPCLMIPSQMLLENFSAAIPGHRCWTHMLDNGSAVSTNMTPKALLTISIPPGPNQGPHQCRRFRQPQWQLLDPNATATSWSEADTEPCVDGWVYXRRSSPPPSWPSGTWCAAPRLEXP

SEQ ID NO: 1689 - protein, 515 aa, Homo sapiens
  SITE (145): Xaa equals any of the naturally occurring L-amino acids
  SITE (151): Xaa equals any of the naturally occurring L-amino acids
  SITE (168): Xaa equals any of the naturally occurring L-amino acids
MAFSKLLEQAGGVGLFQTLQVLTFILPCLMIPSQMLLENFSAAIPGHRCWTHMLDNGSAVSTNMTPKALLTISIPPGPNQGPHQCRRFRQPQWQLLDPNATATSWSEADTEPCVDGWVYDRSVFTSTIVAKWDLVCSSQGLKPLXQSIFMXGILVGSFIWGLLSYRFXRKPMLSWCCLQLAVAGTSTIFAPTFVIYCGLRFVAAFGMAGIFLSSLTLMVEWTTTSRRAVTMTVVGCAFSAGQAALGGLAFALRDWRTLQLAASVPFFAISLISWWLPESARWLIIKGKPDQALQELRKVARINGHKEAKNLTIEVLMSSVKEEVASAKEPRSVLDLFCVPVLRWRSCAMLVVNFSLLISYYGLVFDLQSLGRDIFLLQALFGAVDFLGRATTALLLSFLGRRTIQAGSQAMGGLAILANMLVPQVRMTADGILHTVGRLGAMMGPLILMSRQALPLLPPLLYGVISIASSLVVLFFLPETQGLPLPDTIQDLESQKSTAAQGNRQEAVTVESTSL

SEQ ID NO: 1690 - protein, 88 aa, Homo sapiens
MDWWFLAIAMALLWLTTSRKQCCSTWALLNYMALMILIGENPDLLVNLDSLQEPVCVILVKGLLFQRIAANLQPLVLHHHTIQMMNKK

SEQ ID NO: 1691 - protein, 81 aa, Homo sapiens
MDWWFLAIAMALLWLTTSRKQCCSTWALLNYMALMILIGENPDLLVNLDSLQEPVCVILVKGLLFQRIAANLQPLQRCQGS

SEQ ID NO: 1692 - protein, 462 aa, Homo sapiens
  SITE (148): Xaa equals any of the naturally occurring L-amino acids
  SITE (149): Xaa equals any of the naturally occurring L-amino acids
  SITE (204): Xaa equals any of the naturally occurring L-amino acids
  SITE (292): Xaa equals any of the naturally occurring L-amino acids
  SITE (303): Xaa equals any of the naturally occurring L-amino acids
MVDYLQKAVLLNLGTIELYGSNDPYRREPRSPRKSRQPSGAGLCDISEGTVVPEDRCKSPTSAKMSRKLSLPTDLKPDLDVKDNSFSRSRSSSVTSIDKESREAISALHFCETFTRKTDSSPSPCLWVGTTLGTVLVIALNLPPGGEXXLLQPVIVSPSGTILRLKGAILRMAFLDTTGCLIPPAYEPWREHNVPEEKDEKEKXKKRRPVSVSPSSSQEISENQYAVICSEKQAKVISLPTQNCAYKQNITETSFVLRGDIVALSNSICLACFCANGHIMTFSLPSLRPLLXVYYLPLTNMRXARTFCFTNNGQALYLVSPTEIQRLTYSQETCENLQEMLGELFTPVETPEAPNRGFFKGLFGGGAQSLDREELFGESSSGKASRSLAQHIPGPGGIEGVKGAASGVVGELARARLALDERGQKLGDLEERTAAMLSSAESFSKHAHEIMLKYKDKKWYQF

SEQ ID NO: 1693 - protein, 112 aa, Homo sapiens
MLISGWARWLMPLVPALWEAEAGESGVQDQPGQCGETLSLLKIKKKKKKKWLISESYSGLNSVIQPKLITLCYLWEPHLKSKDPDTCLILWQGSNESNKMLVKVRTGSILNT

SEQ ID NO: 1694 - protein, 82 aa, Homo sapiens
  SITE (45): Xaa equals any of the naturally occurring L-amino acids
  SITE (76): Xaa equals any of the naturally occurring L-amino acids
MGLQSRLSQPCHCRHLGLGNSVVGTVLFLVGCLVASLPPPTRCQXHCSPQPPAPVVTIVSKHCQMVQGKGKIAPVXKSTAVK

SEQ ID NO: 1695 - protein, 82 aa, Homo sapiens; identical to SEQ ID NO: 1510

SEQ ID NO: 1696 - protein, 193 aa, Homo sapiens
MQLGTLLTFFHELVQTALPSGSCVDTLLKDLCKMYTTLTALVRYYLQVCQSSGGIPKNMEKLVKLSGSHLTPLCYSFISYVQNKSKSLNYTGEKKEKPAAVATAMARVLRETKPIPNLIFAIEQYEKFLIHLSKKSKVNLMQHMKLSTSRDFKIKGNILDMVLREDGEDENEEGTASEHGGQNKEPAKKKRKK

SEQ ID NO: 1697 - protein, 193 aa, Homo sapiens; identical to SEQ ID NO: 1696

SEQ ID NO: 1698 - protein, 22 aa, Homo sapiens
MVCDSLPRHDFHPARLHPTRFL

SEQ ID NO: 1699 - protein, 271 aa, Homo sapiens
MLSEKHLISVCADNNHVRTWSVTRFRGMISTQPGSTPLASFKILALESADGHGGCSAGNDIGPYGERDDQQVFIQKVVPSASQLFVRLSSTGQRVCSVRSVDGSPTTAFTVLECEGSRRLGSRPRRYLLTGQANGSLAMWDLTTAMDGLGQAPAGGLTEQELMEQLEHCELAPPAPSAPSWGCLPSPSPRISLTSLHSASSNTSLSGHRGSPSPPQAEARRRGGGSFVERCQELVRSGPDLRRPPTPAPWPSSGLGTPLTPPKMKLNETSF

SEQ ID NO: 1700 - protein, 148 aa, Homo sapiens
  SITE (71): Xaa equals any of the naturally occurring L-amino acids
  SITE (125): Xaa equals any of the naturally occurring L-amino acids
MRSSCVLLTALVALAAYYVYIPLPGSVSDPWKLMLLDATFRGAQQVSNLIHYLGLSHHLLALNFIIVSFGXKSAWSSAQVKVTDTDFDGVEVRVFEGPPKPEEPLKRSVVYIHGGGWALASAKIXYYDELCTAMAEELNAALFPLNTG

SEQ ID NO: 1701 - protein, 148 aa, Homo sapiens; identical to SEQ ID NO: 1700
  SITE (71): Xaa equals any of the naturally occurring L-amino acids
  SITE (125): Xaa equals any of the naturally occurring L-amino acids

SEQ ID NO: 1702 - protein, 408 aa, Homo sapiens
  SITE (223): Xaa equals any of the naturally occurring L-amino acids
MRSSCVLLTALVALAAYYVYIPLPGSVSDPWKLMLLDATFRGAQQVSNLIHYLGLSHHLLALNFIIVSFGQKSAWSSAQVKVTDTDFDGVEVRVFEGPPKPEEPLKRSVVYIHGGGWALASAKISYYDELCTAMAEELNAVIVSIEYRLVPKVYFPEQIHDVVRATKYFLKPEVLQKYMVDPGRICISGDSAGGNLAAALGQQFTQDASLKNKLKLQALIYPXLQALDFNTPSYQQNVNTPILPRYVMVKYWVDYFKGNYDFVQAMIVNNHTSLDVEEAAAVRARLNWTSLLPASFTKNYKPVVQTTGNARIVQELPQLLDARSAPLIADQAVLQLLPKTYILTCEHDVLRDDGIMYAKRLESAGVEVTLDHFEDGFHGCMIFTSWPTNFSVGIRTRNSYIKWLDQNL

SEQ ID NO: 1703 - protein, 88 aa, Homo sapiens
MMFCFVLFLRWSLALLPGWLAVARSRLTAISCFLGLSDSPALASRVAGTTGAHHHARLVFCILVETVSPCWPGWSRSPDFVICLPQTP

SEQ ID NO: 1704 - protein, 88 aa, Homo sapiens; identical to SEQ ID NO: 1703

SEQ ID NO: 1705 - protein, 94 aa, Homo sapiens
MIGYRLCLHLLSLLGFQPLPMGLCRVREQKFKQFSGLSHFSFRISPVTFPSYVHADSQPTRDKWVPWDLSSFTCMCAEASKSARNVWTALQTPL

SEQ ID NO: 1706 - protein, 61 aa, Homo sapiens
SQHFGRPRWKDCLKPGVRDQPGQHSKTPSLCKKKGIILYFLLIRFICVSNLHLQFDFFSDL

SEQ ID NO: 1707 - protein, 101 aa, Homo sapiens
  SITE (69): Xaa equals any of the naturally occurring L-amino acids
VIFFFFFSCRERVCVAQAGLNFMASSYSASASRSAGNIGMSHHTQPLCLLSFSIIINLFMFIHSPVDEXLGCFQFWAVTNKAPGNICVQKKKKKKKKKKKK

SEQ ID NO: 1708 - protein, 123 aa, Homo sapiens
MAWPNVFQRGSLLSQFSHHHVVVFLLTFFSYSLLHASRKTFSNVKVSISEQWTPSAFNTSVELPLEIWSSNHLFPSAEKATLFLGTLDTIFLFSYAVGLFISGIVGDRLNLRWVLLLACALLH

SEQ ID NO: 1709 - protein, 160 aa, Homo sapiens
  SITE (7): Xaa equals any of the naturally occurring L-amino acids
LPNCYLXDTIEGTPAGTGPEFAAASTSLKECRAVIIASRGQPVWPALLDVHAVDDFVVSCNLAHRRATIPEEDCSKLLPSFPDHGDPLTVFSPSNVFDLPSERLVLILQQVLLLRGIPDPQLPRHISGGNVESAGRILGHHHLMGVLCVDVSKGWVVDVP

SEQ ID NO: 1710 - protein, 21 aa, Homo sapiens
HHHLMGVLCVDVSKGWVVDVP

SEQ ID NO: 1711 - protein, 185 aa, Homo sapiens
  SITE (163): Xaa equals any of the naturally occurring L-amino acids
MAWPNVFQRGSLLSQFSHHHVVVFLLTFFSYSLLHASRKTFSNVKVSISEQWTPSAFNTSVELPLEIWSSNHLFPSAEKATLFLGTLDTIFLFSYAVGLFISGIVGDRLNLRWVLSFGMCSSALVVFVFGALTEWLRFYNKWLYCCLWIVNGLLQSTGWPCVXAVMGNWFGKAGYATSFLSNFSV

SEQ ID NO: 1712 - protein, 102 aa, Homo sapiens
  SITE (13): Xaa equals any of the naturally occurring L-amino acids
  SITE (14): Xaa equals any of the naturally occurring L-amino acids
MRVSCSRSCCSLXXISLSLRLVASCLPCCLCLSAAPRMQEEPGHLRPSRARPLEGPSWDSPSLAPPASAQRPLPPPVSRILPATSGRAGRWCGWAPCPKTAA

SEQ ID NO: 1713 - protein, 53 aa, Homo sapiens
  SITE (31): Xaa equals any of the naturally occurring L-amino acids
VWARWPMLSIPAAQGGRLLEPKHSRLAWETXQDPVSTKTFKMSQVAGCGGSCL

SEQ ID NO: 1714 - protein, 173 aa, Homo sapiens [sequence omitted]

SEQ ID NO: 1715 - protein, 102 aa, Homo sapiens
MRVSCSRSCCSLPPISLSLRLVASCLPCCLCLSAAPRMQEEPGHLRPSRARPLEGPSWDSPSLAPPASAQRPLPPPVSRILPATSGRAGRWCGWAPCPKTAA

SEQ ID NO: 1716 - protein, 180 aa, Homo sapiens
  SITE (140): Xaa equals any of the naturally occurring L-amino acids
MPAPARSCQRAALSLWASGLGWLSAQPTVAFRGSSWDWEPPQGQADGVRFVLGLVLPMLGGGGAPRTDQPCFSCNAVTLSLNTWIHVWPGLAGSRSPARVGSHGPALEPPSGPGAAEAASEGLPRPAFHRWGAQPSKAAXTPPRPVCQGAGHNPAGPRTGLQASPCAPAGRPCSREEVLG

SEQ ID NO: 1717 - protein, 131 aa, Homo sapiens
  SITE (24): Xaa equals any of the naturally occurring L-amino acids
  SITE (122): Xaa equals any of the naturally occurring L-amino acids
  SITE (123): Xaa equals any of the naturally occurring L-amino acids
EAKGTAMQRPWGRTAPGMREEQSXERRAGRAGPCGPQGGLGHLPRGSGAPGCVSRWERQGRICGDLTRAGEAETRVQPPPPKAGPSQRRGRAGQEVSGCLLGLVWFCFVLFIVVKYKIYRLXXKKKKKGRP

SEQ ID NO: 1718 - protein, 180 aa, Homo sapiens [sequence omitted]

SEQ ID NO: 1719 - protein, 177 aa, Homo sapiens
  SITE (120): Xaa equals any of the naturally occurring L-amino acids
  SITE (124): Xaa equals any of the naturally occurring L-amino acids
  SITE (126): Xaa equals any of the naturally occurring L-amino acids
  SITE (148): Xaa equals any of the naturally occurring L-amino acids
  SITE (171): Xaa equals any of the naturally occurring L-amino acids
  SITE (172): Xaa equals any of the naturally occurring L-amino acids
MVGKIKRLKKSAFVVLILLITAKLLVLPLLCREMVELLDKGDSVVNHTSLSNYAFLYGVFPVAPGVAIFATQFNMEVEIITSGMVISTFVSAPIMYVSAWLLTFPTMDPKPLAYAIQNVXFDIXIXSLISLIWSLAILLLSKKYKQLXHMLTTNLLIAQSIVCAGMMIWNXXKEKNF

SEQ ID NO: 1720 - protein, 447 aa, Homo sapiens
TTTKFAAASTFHPASKSNIKKVWMAEQKISYDKKKQEELMQQYLKEQESYDNRLLMGDERVKNGLNFMYEAPPGAKKENKEKEETEGETEYKFEWQKGAPREKYAKDDMNIRDQPFGIQVRNVRCIKCHKWGHVNTDRECPLFGLSGINASSVPTDGSGPSMHPSELIAEMRNSGFALKRNVLGRNLTANDPSQEYVASEGEEDPEVEFLKSLTTKQKQKLLRKLDRLEKKKKKKDRKKKKFQKSRSKHKKHKSSSSSSSSSSSSSSTETSESSSESESNNKEKKIQRKKRKKNKCSGHNNSDSEEKDKSKKRKLHEELSSSHHNREKAKEKPRFLKHESSREDSKWSHSDSDKKSRTHKHSPEKRGSERKEGSSRSHGREERSRRSRSRSPGSYKQRETRKRAQRNPGEEQSRRNDSRSHGTDLYRGEKMYREHPGGTHTKVTQRE

SEQ ID NO: 1721 - protein, 177 aa, Homo sapiens
  SITE (98): Xaa equals any of the naturally occurring L-amino acids
  SITE (134): Xaa equals any of the naturally occurring L-amino acids
  SITE (148): Xaa equals any of the naturally occurring L-amino acids
  SITE (171): Xaa equals any of the naturally occurring L-amino acids
  SITE (172): Xaa equals any of the naturally occurring L-amino acids
MVGKIKRLKKSAFVVLILLITAKLLVLPLLCREMVELLDKGDSVVNHTSLSNYAFLYGVFPVAPGVAIFATQFNMEVEIITSGMVISTFVSAPIMYVXAWLLTFPTMDPKPLAYAIQNVSFDISIVSLISLIWXLAILLLSKKYKQLXHMLTTNLLIAQSIVCAGMMIWNXXKEKNF

SEQ ID NO: 1722 - protein, 227 aa, Homo sapiens
  SITE (171): Xaa equals any of the naturally occurring L-amino acids
MVGKIKRLKKSAFVVLILLITAKLLVLPLLCREMVELLDKGDSVVNHTSLSNYAFLYGVFPVAPGVAIFATQFNMEVEIITSGMVISTFVSAPIMYVSAWLLTFPTMDPKPLAYAIQNVSFDISIVSLISLIWSLAILLLSKKYKQLPHMLTTNLLIAQSIVCAGMMIWNXVKEKNFVGQILVFVLLYSSLYSTYLWTGLLAISLFLLKKRERVQIPVGIIIISGWG

SEQ ID NO: 1723 - protein, 227 aa, Homo sapiens
MVGKIKRLKKSAFVVLILLITAKLLVLPLLCREMVELLDKGDSVVNHTSLSNYAFLYGVFPVAPGVAIFATQFNMEVEIITSGMVISTFVSAPIMYVSAWLLTFPTMDPKPLAYAIQNVSFDISIVSLISLIWSLAILLLSKKYKQLPHMLTTNLLIAQSIVCAGMMIWNFVKEKNFVGQILVFVLLYSSLYSTYLWTGLLAISLFLLKKRERVQIPVGIIIISGWG

SEQ ID NO: 1724 - protein, 87 aa, Homo sapiens
  SITE (61): Xaa equals any of the naturally occurring L-amino acids
  SITE (82): Xaa equals any of the naturally occurring L-amino acids
MQWRALVLGLVLLRLGLHGVLWLVFGLGPSMGFYQRFPLSFGFQRLRSPDGPASPTFGARXPAWGGIRAVVACNRRGTGQRXTRAKL

SEQ ID NO: 1725 - protein, 146 aa, Homo sapiens
  SITE (115): Xaa equals any of the naturally occurring L-amino acids
  SITE (123): Xaa equals any of the naturally occurring L-amino acids
  SITE (140): Xaa equals any of the naturally occurring L-amino acids
MQWRALVLGLVLLRLGLHGVLWLVFGLGPSMGFYQRFPLSFGFQRLRSPDGPASPTSGPVGRPGGVSGPSWLQPPGTGAAQSPRKAPRRPGPGMCGPANWGYVLGRPGRGPDEYXEAATAAPXLRNLRARCPELARGMVXFWATTL

SEQ ID NO: 1726 - protein, 405 aa, Homo sapiens
MQWRALVLGLVLLRLGLHGVLWLVFGLGPSMGFYQRFPLSFGFQRLRSPDGPASPTSGPVGRPGGVSGPSWLQPPGTGAAQSPRKAPRRPGPGMCGPANWGYVLGGRGRGPDEYEKRYSGAFPPQLRAQMRDLARGMFVFGYDNYMAHAFPQDELNPIHCRGRGPDRGDPSNLNINDVLGNYSLTLVDALDTLAIMGNSSEFQKAVKLVINTVSFDKDSTVQVFEATIRVLGSLLSAHRIITDSKQPFGDMTIKDYDNELLYMAHDLAVRLLPAFENTKTGIPYPRVNLKTGVPPDTNNETCTAGAGSLLVEFGILSRLLGDSTFEWVARRAVKALWNLRSNDTGLLGVAPFLAIGTAHCLVPFSFHLLWALPPFYSSTQLTTQQELCQLYLISLCDPLQRGCMV

SEQ ID NO: 1727 - protein, 120 aa, Homo sapiens
  SITE (116): Xaa equals any of the naturally occurring L-amino acids
  SITE (120): Xaa equals any of the naturally occurring L-amino acids
MILWLDWALFLLVFPGQFFCWFCLGSLMRLQVAAGSASVWGSAGMTWPLSACGPLSSMMVSGFQASKPQCTSIYPAFACIALAHVSLAKTDHVAKLRVSVGRVYTSAWILKGMIHXGPLX

SEQ ID NO: 1728 - protein, 53 aa, Homo sapiens
  SITE (11): Xaa equals any of the naturally occurring L-amino acids
KYSYCSHLHFXMNESALFCSNFHWKPVGSERLWPPLIIYDLKPACNREPLQSL

SEQ ID NO: 1729 - protein, 120 aa, Homo sapiens
MILWLDWALFLLVFPGQFFCWFCLGSLMRLQVAAGSASVWGSAGMTWPLSACGPLSSMMVSGFQASKPQCTSIYPAFACIALAHVSLAKTDHVAKLRVSVGRVYTSAWILKGMIHWGPLL

SEQ ID NO: 1730 - protein, 485 aa, Homo sapiens [sequence omitted]

SEQ ID NO: 1731 - protein, 485 aa, Homo sapiens [sequence omitted]

SEQ ID NO: 1732 - protein, 485 aa, Homo sapiens [sequence omitted]

SEQ ID NO: 1733 - protein, 65 aa, Homo sapiens [sequence omitted]

SEQ ID NO: 1734 - protein, 65 aa, Homo sapiens [sequence omitted]

SEQ ID NO: 1735 - protein, 342 aa, Homo sapiens
  SITE (150): Xaa equals any of the naturally occurring L-amino acids
  SITE (271): Xaa equals any of the naturally occurring L-amino acids
MWTALVLIWIFSLSLSESHAASNDPRNFVPNKMWKGLVKRNASVETVDNKTSEDVTMAAASPVTLTKGTSAAHLNSMEVTTEDTSRTDVSEPATSGGAADGVTSIAPTAVASSTTAASITTAASSMTVASSAPTTAASSTTVASIAPTTXASSMTAASSTPMTLALPAPTSTSTGRTPSTTATGHPSLSTALAQVPKSSALPRTATLATLATRAQTVATTANTSSPMSTRPSPSKHMPSDTAASPVPPMRPQAQGPISQVSVDQPVVNTTXKSTPMPSNTTTEPLTQAVVDKTLLLVVLLLGVTLFITVLVLFALQAYESYKKKDYTQVDYLINGMYADSEM

SEQ ID NO: 1736 - protein, 96 aa, Homo sapiens
  SITE (75): Xaa equals any of the naturally occurring L-amino acids
MTLPTSQCLICLLQALCGIGHGALAWGSNQVLFPGGQQEDGGCQRIPDPSFLSTPCGKQGGHAEQELQQCWGAFXQLPGCVLHFHPGVLHKAHSEW

SEQ ID NO: 1737 - protein, 79 aa, Homo sapiens [sequence omitted]

SEQ ID NO: 1738 - protein, 96 aa, Homo sapiens
MTLPTSQCLICLLQALCGIGHGALAWGSNQVLFPGGQQEDGGCQRIPDPSFLSTPCGKQGGHAEQELQQCWGAFCQLPGCVLHFHPGVLHKAHSEW

SEQ ID NO: 1739 - protein, 162 aa, Homo sapiens
  SITE (134): Xaa equals any of the naturally occurring L-amino acids
  SITE (142): Xaa equals any of the naturally occurring L-amino acids
  SITE (154): Xaa equals any of the naturally occurring L-amino acids
  SITE (161): Xaa equals any of the naturally occurring L-amino acids
MALPRCTWPNYVWRAVMACLVHRGLGAPLTLCMLGCLLQAGHVLSQKLDDVDPLVATNFGKIRGIKKELNNEILGPVIQFLGVPYAAPPTGERRFQPPEPPSPWSDIRNATQFAPVCPQNIIDGRLPEVMLPVXFTNNLDVXSSYVQDQSERLXIFKYICXD

SEQ ID NO: 1740 - protein, 228 aa, Homo sapiens
MALPRCTWPNYVWRAVMACLVHRGLGAPLTLCMLGCLLQAGHVLSQKLDDVDPLVATNFGKIRGIKKELNNEILGPVIQFLGVPYAAPPTGERRFQPPEPPSPWSDIRNATQFAPVCPQNIIDGRLPEVMLPVWFTNNLDVVSSYVQDQSEDCLYLNIYVPTEDDIRDSGGPKPVMVYIHGGSYMEGTGNLYDGSVLASYGNVIVITVNYRLGVLGKKSLSFVFTMNP

SEQ ID NO: 1741 - protein, 94 aa, Homo sapiens
MLPTLTAPTLALLLLPKISCLLTSTHPRTQGSRAHFPRAWRLDPGEFLHPLQDPHSSPLWSLDHRWRWPELTCWLWGHSSCWPRMRRGTREYKG

SEQ ID NO: 1742 - protein, 94 aa, Homo sapiens; identical to SEQ ID NO: 1741

SEQ ID NO: 1743 - protein, 57 aa, Homo sapiens
  SITE (8): Xaa equals any of the naturally occurring L-amino acids
  SITE (9): Xaa equals any of the naturally occurring L-amino acids
MRTDYPRXXRSCLCVSLSPPLVSKGSHRSRWLRTMAVPAGTQVWRQDLQPLGAVLLQ

SEQ ID NO: 1744 - protein, 123 aa, Homo sapiens
MRTDYPRSVLAPAYVSVCLLLLCPREVIAPAGSEPWLCQPAPRCGDKIYNPLEQCCYNDAIVSLSETRQCGPPCTFWPCFELCCLDSFGLTNDFVVKLKVQGVNSQCHSSPISSKCESRRRFP

SEQ ID NO: 1745 - protein, 107 aa, Homo sapiens [sequence omitted]

SEQ ID NO: 1746 - protein, 107 aa, Homo sapiens [sequence omitted]

SEQ ID NO: 1747 - protein, 120 aa, Homo sapiens [sequence omitted]

SEQ ID NO: 1748 - protein, 62 aa, Homo sapiens
  SITE (23): Xaa equals any of the naturally occurring L-amino acids
DVLQITFWWPLVTAVSLQGLNKXLSPIPFHTCVVYYWQASVLRVSNGTDGCQTLWISASPGW

SEQ ID NO: 1749 - protein, 120 aa, Homo sapiens [sequence omitted]

SEQ ID NO: 1750 - protein, 105 aa, Homo sapiens
MDDFLFSVSILSGILCSILAVLKFMLGKVLTSRALITDGFNSLVGGVMGFSILLSAEVFKHDSAVWYLDGSIGVLIGLTIFAYGVKLLIDMVPRVRQTRHYEMFE

SEQ ID NO: 1751 - protein, 186 aa, Homo sapiens
  SITE (138): Xaa equals any of the naturally occurring L-amino acids
  SITE (166): Xaa equals any of the naturally occurring L-amino acids
MLDKIISIFIIFLLVIGTLLLALLLTAKVHQESVHMIEVTSNLINETLANHPEWANWLPEAQVVQRALNSAANNVYQYGREWITHKLHKILGDKVNNTAVIEKQVLELWDRLYHSWFVKNVTHSGRHKGQKLHVSRQXSWLGDILDWQDIVSFVHENIETFLSILXSLWIVMSLNVSLLLPLALHS

SEQ ID NO: 1752 - protein, 224 aa, Homo sapiens
VLSLIIFLTTLFYLLSSSDEYYKPVKWVISLTPLSQPGPSSNIIGQSVEEAIRGVFDASLKMAGFYGLYTWLTHTMFGINIVFIPSALAAILGAVPFLGTYWAAVPAVLDLWLTQGLGCKAILLLIFHLLPTYFVDTAIYSDISGGGHPYLTGLAVAGGAYYLGLEGAIIGPILLCILVVASNIYSAMLVSPTNSVPTPNQTPWPAQPQRTFRDISEDLKSSVG

SEQ ID NO: 1753 - protein, 424 aa, Homo sapiens
  SITE (138): Xaa equals any of the naturally occurring L-amino acids
  SITE (183): Xaa equals any of the naturally occurring L-amino acids
MLDKIISIFIIFLLVIGTLLLALLLTAKVHQESVHMIEVTSNLINETLANHPEWANWLPEAQVVQRALNSAANNVYQYGREWITHKLHKILGDKVNNTAVIEKQVLELWDRLYHSWFVKNVTHSGRHKGQKLHVSRQXSWLGDILDWQDIVSFVHENIETFLSILESLWIVMSRNVSLLFTTXTTLLTILFYSGTALLNFVLSLIIFLTTLFYLLSSSDEYYKPVKWVISLTPLSQPGPSSNIIGQSVEEAIRGVFDASLKMAGFYGLYTWLTHTMFGINIVFIPSALAAILGAVPFLGTYWAAVPAVLDLWLTQGLGCKAILLLIFHLLPTYFVDTAIYSDISGGGHPYLTGLAVAGGAYYLGLEGAIIGPILLCILVVASNIYSAMLVSPTNSVPTPNQTPWPAQPQRTFRDISEDLKSSVG

SEQ ID NO: 1754 - protein, 385 aa, Homo sapiens
MLDKIISIFIIFLLVIGTLLLALLLTAKVHQESVHMIEVTSNLINETLANHPEWANWLPEAQVVQRALNSAANNVYQYGREWITHKLHKILGDKVNNTAVIEKQVLELWDRLYHSWFVKNVTHSGRHKGQKLHVSRQNSWLGDILDWQDIVSFVHENIETFLSILESLWIVMSRNVSLLFTTVTTLLTILFYSGTALLNFVLSLIIFLTTLFYLLSSSDEYYKPVKWVISLTPLSQPGPSSNIIGQSVEEAIRGVFDASLKMAGFYGLYTWLTHTMFGINIVFIPSALAAILGAVPFLGTYWAAVPAVLDLWLTQGLGCKAILLMIFHLLPTYFVDTAIYSDISGGGHPYLTGLAVAGGSILPRPGRSNHRSYSSLHTCGCFQYL

SEQ ID NO: 1755 - protein, 293 aa, Homo sapiens [sequence omitted]

SEQ ID NO: 1756 - protein, 566 aa, Homo sapiens
MQVVSHGDERPAWLMSETLRHLHTHFGADYDWFFIMQDDTYVQAPRLAALAGHLSINQDLYLGRAEEFIGAGEQARYCHGGFGYLLSRSLLLRLRPHLDGCRGDILSARPDEWLGRCLIDSLGVGCVSQHQAQIRNLTVLTPEGEAGLSWPVGLPAPFTPHSRFEVLGWDYFTEQHTFSCADGAPKCPLQGASRADVGDALETALEQLNRRYQPRLRFQKQRLLNGYRRFDPARGMEYTLDPGSTHASERGHRRALARRVSLLRPLSRVEILPMPYVTEATRVQLVLPLLVAEAAAAPAFLEAFAANVLEPREHALLTLLLVYGPREGGRGAPDPFLGVKAAAAELERRYPGTRLAWLAVRAEAPSQVRLMDVVSKKHPVDTLFFLTTVWTRPGPEVLNRCRMNAISGWQAFFPVHFQEFNPALSPQRSPPGPPGAGPDPPSPPGADPSRGAPIAGRFDRQASAEGCFYNADYLAARARLAGELAGQEEEEALEGLEVMDVFLRFSGLHLFRAVEPGLVQKFSLRDCSPRLSEELYHRCRLSNLEGLGGRAQLAMALFEQEQANST

SEQ ID NO: 1757 - protein, 249 aa, Homo sapiens
  SITE (221): Xaa equals any of the naturally occurring L-amino acids
  SITE (241): Xaa equals any of the naturally occurring L-amino acids
  SITE (246): Xaa equals any of the naturally occurring L-amino acids
MEFSWLETRWARPFYLAFVFCLALGLLQAIKLYLRRQRLLRDLRPFPAPPTHWFLGHQKFIQDDNMEKLEEIIEKYPRAFPFWIGPFQAFFCIYDPDYAKTLLSRTDPKSQYLQKFSPPLLGKGLAALDGPKWFQHRRLLTPGFHFNILKAYIEVMAHSVKMMLDKWEKICSTQDTSVEVYEHINSMSLDIIMKCAFSKETNCQTNSTHDPYAKAILNSAXSYFTVVQLLYHSDIFFKFSXQGYRXPEL

SEQ ID NO: 1758 - protein, 96 aa, Homo sapiens
  SITE (74): Xaa equals any of the naturally occurring L-amino acids
  SITE (88): Xaa equals any of the naturally occurring L-amino acids
  SITE (89): Xaa equals any of the naturally occurring L-amino acids
  SITE (91): Xaa equals any of the naturally occurring L-amino acids
AQGHPWSVRTQLPRIPRPSPMTLGPQILICHSGSAAGSRNCIGQEFAMIELKVTIALILLHFRVTPDPTRPLTXPNHFILKPKNGMYXXLXKLSEC

SEQ ID NO: 1759 - protein, 249 aa, Homo sapiens
  SITE (242): Xaa equals any of the naturally occurring L-amino acids
  SITE (247): Xaa equals any of the naturally occurring L-amino acids
  SITE (248): Xaa equals any of the naturally occurring L-amino acids
MEFSWLETRWARPFYLAFVFCLALGLLQAIKLYLRRQRLLRDLRPFPAPPTHWFLGHQKFIQDDNMEKLEEIIEKYPRAFPFWIGPFQAFFCIYDPDYAKTLLSRTDPKSQYLQKFSPPLLGKGLAALDGPKWFQHRRLLTPGFHFNILKAYIEVMAHSVKMMLDKWEKICSTQDTSVEVYEHINSMSLDIIMKCAFSKETNCQTNSTHDPYAKAIFELSKIIFHRLYSCCITVTYFSNSAXRVTVXXS

SEQ ID NO: 1760 - protein, 509 aa, Homo sapiens
MEFSWLETRWARPFYLAFVFCLALGLLQAIKLYLRRQRLLRDLRPFPAPPTHWFLGHQKFIQDDNMEKLEEIIEKYPRAFPFWIGPFQAFFCIYDPDYAKTLLSRTDPKSQYLQKFSPPLLGKGLAALDGPKWFQHRRLLTPGFHFNILKAYIEVMAHSVKMMLDKWEKICSTQDTSVEVYEHINSMSLDIIMKCAFSKETNCQTNSTHDPYAKAIFELSKIIFHRLYSLLYHSDIIFKLSPQGYRFQKLSRVLNQYTDTIIQERKKSLQAGVKQDNTPKRKYQDFLDIVLSAKDESGSSFSDIDVHSEVSTFLLAGHDTLAASISWILYCLALNPEHQERCREEVRGILGDGSSITWDQLGEMSYTTMCIKETCRLIPAVPSISRDLSKPLTFPDGCTLPAGITVVLSIWGLHHNPAVWKNPKVFDPLRFSQENSDQRHPYAYLPFSAGSRNCIGQEFAMIELKVTIALILLHFRVTPDPTRPLTFPNHFILKPKNGMYLHLKKLSEC

SEQ ID NO: 1761 - protein, 143 aa, Homo sapiens [sequence omitted]

SEQ ID NO: 1762 - protein, 143 aa, Homo sapiens [sequence omitted]

SEQ ID NO: 1763 - protein, 88 aa, Homo sapiens
MKSLIKTYFLLWTLKKLLPLSTLIPIMLSPLDIFFSDNPHIDCSGHHFVPYLLIGLDTDPQFTCLYLLILTLLVFVFSLTLLSPPSPG

SEQ ID NO: 1764 - protein, 88 aa, Homo sapiens; identical to SEQ ID NO: 1763

SEQ ID NO: 1765 - protein, 231 aa, Homo sapiens
  SITE (146): Xaa equals any of the naturally occurring L-amino acids
  SITE (177): Xaa equals any of the naturally occurring L-amino acids
  SITE (193): Xaa equals any of the naturally occurring L-amino acids
  SITE (199): Xaa equals any of the naturally occurring L-amino acids
  SITE (208): Xaa equals any of the naturally occurring L-amino acids
  SITE (222): Xaa equals any of the naturally occurring L-amino acids
  SITE (231): Xaa equals any of the naturally occurring L-amino acids
MALSSLIVILLVVFALVLHGQNKKYKNCSTGKGISTMEESVTLDNGGFAALELSSRHLNVKSTFSKKNGTRSPPRPSPGGLHYSDEDICNKYNGAVLTESVSLKEKSADASESEATDSDYEDALPKHSFVNHYMSDPTYYNSWKRXAQGPRTCAAQVRGGGGLRGGRAAAPGHHHAXRGRRLHPRWPRRANFXYRLLLXRVSKSAALXQGGTEATFRSLFLXRQFNSNKLX

SEQ ID NO: 1766 - protein, 127 aa, Homo sapiens
EGFFKRLFVTSLQEAGLFLFLFFLREGVFHWCNGLAPPGPGRTSDLPSPGFLRLQDQLGRVKRGEGVEGQVRSQSCPGRPPSLSTSSSREPAAHTLLNAGHPRRLLGFEEQTFFPGLSAFCPNFICF

SEQ ID NO: 1767 - protein, 240 aa, Homo sapiens
  SITE (192): Xaa equals any of the naturally occurring L-amino acids
  SITE (222): Xaa equals any of the naturally occurring L-amino acids
  SITE (235): Xaa equals any of the naturally occurring L-amino acids
MALSSLIVILLVVFALVLHGQNKKYKNCSTGKGISTMEESVTLDNGGFAALELSSRHLNVKSTFSKKNGTRSPPRPSPGGLHYSDEDICNKYNGAVLTESVSLKEKSADASESEATDSDYEDALPKHSFVNHYMSDPTYYNSWKRRAQGPRTCAAQVRGGGGLRGGRAAAPGHHHAERGRRLHPRWPRRANXAHRLLLLRVSKAPRLPQGGTEATFRSLFLXRQSTPITELKFLXKKKKI

SEQ ID NO: 1768 - protein, 96 aa, Homo sapiens
MYLPCQMACSLFVLFVIWLLLKIFQAGPQLMSLAHGSATLVLDGMNIFGPSGYGQECRVACNYFRKCRVPSWARCLMPVIPALWEAEAADQLRLGV

SEQ ID NO: 1769 - protein, 57 aa, Homo sapiens
LYQEKPLMWPRTSLLYVVPRWLLPCSSLPCPLPEIKNSLTEKKKKKKKNKKKKKGRP

SEQ ID NO: 1770 - protein, 104 aa, Homo sapiens [sequence omitted]

SEQ ID NO: 1771 - protein, 206 aa, Homo sapiens
  SITE (176): Xaa equals any of the naturally occurring L-amino acids
  SITE (180): Xaa equals any of the naturally occurring L-amino acids
  SITE (188): Xaa equals any of the naturally occurring L-amino acids
  SITE (189): Xaa equals any of the naturally occurring L-amino acids
  SITE (198): Xaa equals any of the naturally occurring L-amino acids
  SITE (200): Xaa equals any of the naturally occurring L-amino acids
  SITE (206): Xaa equals any of the naturally occurring L-amino acids
MANFKGHALPGSFFLIIGLCWSVKYPLKYFSHTRKNSPLHYYQRLEIVEAAIRTLFSVTVSGIVDMLTYLVSHVPLGVDRLVMAVAVFMEGFLFYYHVHNRPPLDQHIHSLLLYALFGGCVSISLEVIFRDHIVLELFRTSLIILQGTWFWQIGFVLFPPFGTPEWDQKDDANLMXITMXFCCTTWLXXTLWPQLFSXYXLFDSDX

SEQ ID NO: 1772 - protein, 275 aa, Homo sapiens
  SITE (59): Xaa equals any of the naturally occurring L-amino acids
MANFKGHALPGSFFLIIGLCWSVKYPLKYFSHTRKNSPLHYYQRLEIVEAAIRTLFSVXGILAEQFVPDGPHLHLYHENHWIKLMNWQHSTMYLFFAVSGIVDMLTYLVSHVPLGVDRLVMAVAVFMEGFLFYYHVHNRPPLDQHIHSLLLYALFGGCVSISLEVIFRDHIVLELFRTSLIILQGTWFWQIGFVLFPPFGTPEWDQKDDANLMFITMCFCWHYLAALSIVAVNYSLVYCLLTRMKRHGRGEIIGIQKLNSDDTYQTALLSGSDEE

SEQ ID NO: 1773 - protein, 237 aa, Homo sapiens
MANFKGHALPGSFFLIIGLCWSVKYPLKYFSHTRKNSPLHYYQRLEIVEAAIRTLFSVTVSGIVDMLTYLVSHVPLGVDRLVMAVAVFMEGFLFYYHVHNRPPLDQHIHSLLLYALFGGCVSISLEVIFRDHIVLELFRTSLIILQGTWFWQIGFVLFPPFGTPEWDQKDDANLMFITMCFCWHYLAALSIVAVNYSLVYCLLTRMKRHGRGEIIGIQKLNSDDTYQTALLSGSDEE

SEQ ID NO: 1774 - protein, 69 aa, Homo sapiens
MHGMHAAGTGTELTLSGCQPLSTLLLLLLYYCPSFVHSINMCKAAALSLPWAAGQHRGGLSGGAGERMA

SEQ ID NO: 1775 - protein, 69 aa, Homo sapiens; identical to SEQ ID NO: 1774

SEQ ID NO: 1776 - protein, 222 aa, Homo sapiens
MTGQIPRLSKVNLFTLLSLWMELFPAEAQRQKSQKNEEGKHGPLGDNEERTRVSTDKRQVKRTGLVVVKNMKIVGLHCSSEDLHAGQIALIKHGSRLKNCDLYFSRKPCSACLKMIVNAGVNRISYWPADPEISLLTEASSSEDAKLDAKAVERLKSNSRAHVCVLLQPLVCYMVQFVEETSYKCDFIQKITKTLPDANTDFYYECKQERIKEYEMLKKKKK

SEQ ID NO: 1777 - protein, 105 aa, Homo sapiens
  SITE (71): Xaa equals any of the naturally occurring L-amino acids
  SITE (104): Xaa equals any of the naturally occurring L-amino acids
ILKVLKVWSFQLFQIAVCDFSHFYLLRNIHKIIPKMKVHFLFSPRLERGGLGCFMRNVFLDLRWSGLPLLXFPAFPPHHTASLGFLPVSQNYTHDHPNIGSMPXL

SEQ ID NO: 1778 - protein, 489 aa, Homo sapiens
MTGQIPRLSKVNLFTLLSLWMELFPAEAQRQKSQKNEEGKHGPLGDNEERTRVSTDKRQVKRTGLVVVKNMKIVGLHCSSEDLHAGQIALIKHGSRLKNCDLYFSRKPCSACLKMIVNAGVNRISYWPADPEISLLTEASSSEDAKLDAKAVERLKSNSRAHVCVLLQPLVCYMVQFVEETSYKCDFIQKITKTLPDANTDFYYECKQERIKEYEMLFLVSNEEMHKQILMTIGLENLCENPYFSNLRQNMKDLILLLATVASSVPNFKHFGFYRSNPEQINEIHNQSLPQEIARHCMVQARLLAYRTEDHKTGVGAVIWAEGKSRSCDGTGAMYFVGCGYNAFPVGSEYADFPHMDDKQKDREIRKFRYIIHAEQNALTFRCQEIKPEERSMIFVTKCPCDECVPLIKGAGIKQIYAGDVDVGKKKADISYMRFGELEGVSKFTWQLNPSGAYGLEQNEPERRENGVLRPVPQKEEQHQDKKLRLGIH

SEQ ID NO: 1779 - protein, 267 aa, Homo sapiens
MTGQIPRLSKVNLFTLLSLWMELFPAEAQRQKSQKNEEGKHGPLGDNEERTRVSTDKRQVKRTGLVVVKNMKIVGLHCSSEDLHAGQIALIKHGSRLKNCDLYFSRKPCSACLKMIVNAGVNRISYWPADPEISLLTEASSSEDAKLDAKAVERLKSNSRAHVCVLLQPLVCYMVQFVEETSYKCDFIQKITKTLPDANTDFYYECKQERIKEYEMLFLVSNEEMHKQILMTIGLENLCENPYFSNLRQNMKDLILLLATVASMCRL

SEQ ID NO: 1780 - protein, 196 aa, Homo sapiens
  SITE (157): Xaa equals any of the naturally occurring L-amino acids
  SITE (169): Xaa equals any of the naturally occurring L-amino acids
  SITE (171): Xaa equals any of the naturally occurring L-amino acids
  SITE (172): Xaa equals any of the naturally occurring L-amino acids
  SITE (174): Xaa equals any of the naturally occurring L-amino acids
  SITE (179): Xaa equals any of the naturally occurring L-amino acids
  SITE (191): Xaa equals any of the naturally occurring L-amino acids
MYLLEQIDMHGFGGTAATSPLTAVFSLSRSLLAAALLYGFCLGAIKTPWPEQHVPVLFSVFCGLLVALSYHLSRQSSDPTVLWSLIRSKLFPELEERSLETARAEPPDPLPDKMRQSVREVLHSDLVMCVVIAVLTFAISASTVFIALKSVLGFVLXALAGGRGLLHTXPXXTXPQNSXPGSACHSRAETXGIQPG

SEQ ID NO: 1781 - protein, 62 aa, Homo sapiens
  SITE (22): Xaa equals any of the naturally occurring L-amino acids
  SITE (52): Xaa equals any of the naturally occurring L-amino acids
HIISAHVSFTRKLILYSNTWQXAGSRALRVTLADQSPIPPFWVVGSLFCPRXAEASESLSVP

SEQ ID NO: 1782 - protein, 577 aa, Homo sapiens
MYLLEQIDMHGFGGTAATSPLTAVFSLSRSLLAAALLYGFCLGAIKTPWPEQHVPVLFSVFCGLLVALSYHLSRQSSDPTVLWSLIRSKLFPELEERSLETARAEPPDPLPDKMRQSVREVLHSDLVMCVVIAVLTFAISASTVFIALKSVLGFVLYALAGAVGFFTHYLLPQLRKQLPWFCLSQPVLKPLEYSQYEVRGAAQVMWFEKLYAGLQCVEKYLIYPAVVLNALTVDAHTVVSHPDKYCFYCRALLMTVAGLKLLRSAFCCPPQQYLTLAFTVLLFHFDYPRLSQGFLLDYFLMSLLCSKLWDLLYKLRFVLTYIAPWQITWGSAFHAFAQPFAVPHSAMLFVQALLSGLFSTPLNPLLGSAVFIMSYARPLKFWERDYNTKRVDHSNTRLVTQLDRNPGADDNNLNSIFYEHLTRSLQHTLCGDLVLGRWGNYGPGDCFVLASDYLNALVHLIEVGNGLVTFQLRGLEFRGTYCQQREVEAITEGVEEDEGCCCCEPGHLPRVLSFNAAFGQRWLAWEVTASKYVLEGYSISDNNAASMLQVFDLRKILITYYVKVRWAGVAGQQGPCG

SEQ ID NO: 1783 - protein, 177 aa, Homo sapiens
  SITE (145): Xaa equals any of the naturally occurring L-amino acids
  SITE (175): Xaa equals any of the naturally occurring L-amino acids
MKLLLLHPAFQSCLLLTLLGLWRTTPEAHASSPGAPAISAASFLQDLIHRYGEGDSLTLQQLKALLNHLDVGVGRGNVTQHVQGHRNLSTCFSSGDLFTAHNFSEQSRIGSSELQEFCPTILQQLDSRACTSENQENEENEQTEXGRPSAVEVWGYGLLCVTVSPSAPSWGPAWXPS

SEQ ID NO: 1784 - protein, 492 aa, Homo sapiens
MKLLLLHPAFQSCLLLTLLGLWRTTPEAHASSPGAPAISAASFLQDLIHRYGEGDSLTLQQLKALLNHLDVGVGRGNVTQHVQGHRNLSTCFSSGDLFTAHNFSEQSRIGSSELQEFCPTILQQLDSRACTSENQENEENEQTEEGRPSAVEVWGYGLLCVTVISLCSLLGASVVPFMKKTFYKRLLLYFIALAIGTLYSNALFQLIPEAFGFNPLEDYYVSKSAVVFGGFYLFFFTEKILKILLKQKNEHHHGHSHYASESLPSKKDQEEGVMEKLQNGDLDHMIPQHCSSELDGKAPMVDEKVIVGSLSVQDLQASQSACYWLKGVRYSDIGTLAWMITLSDGLHNFIDGLAIGASFTVSVFQGISTSVAILCEEFPHELGDFVILLNAGMSIQQALFFNFLSACCCYLGLAFGILAGSHFSANWIFALAGGMFLYISLADMFPEMNEVCQEDERKGSILIPFIIQNLGLLTGFTIMVVLTMYSGQIQIG

SEQ ID NO: 1785 - protein, 192 aa, Homo sapiens [sequence omitted]

SEQ ID NO: 1786 - protein, 192 aa, Homo sapiens [sequence omitted]

SEQ ID NO: 1787 - protein, 167 aa, Homo sapiens
  SITE (25): Xaa equals any of the naturally occurring L-amino acids
  SITE (150): Xaa equals any of the naturally occurring L-amino acids
MIGPHGYISASDWPLMIFYMVMCIXYILYGILWLTWSACYWKDILRIQFWIAAVIFLGMLEKAVFYSEYQNISNTGLSTQGLLIFAELISAIKRTLARLLVIIVSLGYGIVKPRLGTVMHRVIGLGLLYLIFAAVEGVMRVIGGSNHLAXGLDDIILAVIDSIFVWV

SEQ ID NO: 1788 - protein, 167 aa, Homo sapiens
MIGPHGYISASDWPLMIFYMVMCIVYILYGILWLTWSACYWKDILRIQFWIAAVIFLGMLEKAVFYSEYQNISNTGLSTQGLLIFAELISAIKRTLARLLVIIVSLGYGIVKPRLGTVMHRVIGLGLLYLIFAAVEGVMRVIGGSNHLAVVLDDIILAVIDSIFVWF

SEQ ID NO: 1789 - protein, 81 aa, Homo sapiens
MVHYSWCALFCHFAQGTCLQNSFQSGLVKGCQGSTGGNQGSFQAAKMSPVCYSGHTGWLSRPWAKSISQSADDRSPPSRRT

SEQ ID NO: 1790 - protein, 81 aa, Homo sapiens; identical to SEQ ID NO: 1789

SEQ ID NO: 1791 - protein, 183 aa, Homo sapiens
  SITE (75): Xaa equals any of the naturally occurring L-amino acids
  SITE (125): Xaa equals any of the naturally occurring L-amino acids
MALARPGTPDPQALASVLLLLLWAPALSLLAGTVPSEPPSACASDPCAPGTECQATESGGYTCGPMEPRGCATQXCHHGALCVPQGPDPNGFRCYCVPGFQGPRCELDIDECASRPCHHGATLPXPGRSLRVPLPLGYAAPHLNPLSYVWGIPHLMRQRLPPDGDSKANDSKKLGPQKIYSGK

SEQ ID NO: 1792 - protein, 103 aa, Homo sapiens
MCFLLFGSLCIYYFSLFLVFFFFLFLFCLVFCSCLHCFRYFFTPLDSPRAGSRWSSYAQLLPPPPPPLVEHSCDADTANLQYPHPRRRYLSRPLNPLPENEGI

SEQ ID NO: 1793 - protein, 103 aa, Homo sapiens; identical to SEQ ID NO: 1792

SEQ ID NO: 1794 - protein, 84 aa, Homo sapiens
  SITE (77): Xaa equals any of the naturally occurring L-amino acids
MGHGRRLGRHLLALPVTLSERCLGSPVENETHSRDGTELPDGSREPSSPRRVSESRVTPARTEEPPAEPSLTPDLRXDNSRGSL

SEQ ID NO: 1795 - protein, 84 aa, Homo sapiens
MGHGRRLGRHLLALPVTLSERCLGSPVENETHSRDGTELPDGSREPSSPRRVSESRVTPARTEEPPAEPSLTPDLRLDNSRGSL

SEQ ID NO: 1796 - protein, 116 aa, Homo sapiens
MGSGCPAQPTLSPWGILSRLLGVLAGTSCGVSTPAAAQGGPEIGCRAPHLHLSGHAPLACPCSFLPTSLGGVCVSAPAPALLSWGTLPAIWYWGCPHCLVLGPGPAHSGLALLVCS

SEQ ID NO: 1797 - protein, 171 aa, Homo sapiens
GPWPLCKAQRCAPDQPSGLPWARLGVRVAHWGGGGLARHSTLAGGPSQREPCRLRWSWPLAGCPGSAPPLQGPSRNLLLNGKSYPTKVRLIRGGSLPPVKRRRMNWIDAPDDVFYMATEETRKIRKLLSSSETKRAARRPYKPIALRQSQALPPRPPPPAPVNDEPIVIED

SEQ ID NO: 1798 - protein, 81 aa, Homo sapiens
MLYPRIFTNRGELLPFLFLTVWLWLYKLLFGESPRYPNVIGKTYFFFWTDQISRESRFLERLAFIVSENCLIFLIHAITGQ

SEQ ID NO: 1799 - protein, 81 aa, Homo sapiens; identical to SEQ ID NO: 1798

SEQ ID NO: 1800 - protein, 149 aa, Homo sapiens
  SITE (140): Xaa equals any of the naturally occurring L-amino acids
MVLLWASVLFPAPEDWAELQGAVYRLLVVLLCCLATRKLPHFLHPQRNLLQGSGLDLGAIYQRVEGFASQPEAALRIHATHLGRSPPPRIGSGLKALLQLPASDPTYWATAYFDVLLDKFQVFNIQDKDRISAMQSIFQXTRTLGGEES

SEQ ID NO: 1801 - protein, 149 aa, Homo sapiens [sequence omitted]

SEQ ID NO: 1802 - protein, 140 aa, Homo sapiens
IPLCSIFGALIAVCLIMGLFDGCFISIMAPIAFELVGAQDVSQAIGFLLGFMSIPMTVGPPIAGLLRDKLGSYDVAFYLAGVPPLIGGAVLCFIPWIHSKKQREISKTTGKEKMEKMLENQNSLLSSSSGMFKKESDSII

SEQ ID NO: 1803 - protein, 234 aa, Homo sapiens
PTRPPTRPVRVSVGGLVGEVACACRDCIPETMAEGDNRSTNLLAAETASLEEQLQGWGEVMLMADKVLRWERAWFPPAIMGVVSLVFLIIYYLDPSVLSGVSCFVMFLCLADYLVPILAPRIFGSNKWTTEQQQRFHEICSNLVKTRRRAVGWWKRLFTLKEEKPKMYFMTMIVSLAAVAWVGQQVHNLLLTYLIVTSLLLLPGLNQHGIILKYIGMAKREINKLLKQKEKKNE

SEQ ID NO: 1804 - protein, 155 aa, Homo sapiens [sequence omitted]

SEQ ID NO: 1805 - protein, 202 aa, Homo sapiens
MAEGDNRSTNLLAAETASLEEQLQGWGEVMLMADKVLRWERAWFPPAIMGVVSLVFLIIYYLDPSVLSGVSCFVMFLCLADYLVPILAPRIFGSNKWTTEQQQRFHEICSNLVKTRRRAVGWWKRLFTLKEEKPKMYFMTMIVSLAAVAWVGQQVHNLLLTYLIVTSLLLLPGLNQHGIILKYIGMAKREINKLLKQKKKKK

SEQ ID NO: 1806 - protein, 485 aa, Homo sapiens
ARKPRSQIKNEINIDTLARDEFNLQKMMVMVTASGKLFGIESSSGTILWKQYLPNVKPDSSFKLMVQRTTAHFPHPPQCTLLVKDKESGMSSLYVFNPIFGKWSQVAPPVLKRPILQSLLLPVMDQDYAKVLLLIDDEYKVTAFPATRNVLRQLHELAPSIFFYLVDAEQGRLCGYRLRKDLTTELSWELTIPPEVQRIVKVKGKRSSEHVHSQGRVMGDRSVLYKSLNPNLLAVVTESTDAHHERTFIGIFLIDGVTGRIIHSSVQKKAKGPVHIVHSENWVVYQYWNTKARRNEFTVLELYEGTEQYNATAFSSLDRPQLPQVLQQSYIFPSSISAMEATITERGITSRHLLIGLPSGAILSLPKALLDPRRPEIPTEQSREENLIPYSPDVQIHAERFINYNQTVSRMRGIYTAPSGLESTCLVVAYGLDIYQTRVYPSKQFDVLKDDYDYVLISSVLFGLVFATMITKRLAQVKLLNRAWR

SEQ ID NO: 1807 - protein, 360 aa, Homo sapiens
MAAEWASRFWLWATLLIPAAAVYEDQVGKFDWRQQYVGKVKFASLEFSPGSKKLVVATEKNVIAALNSRTGEILWRHVDKGTAEGAVDAMLLHGQDVITVSNGGRIMRSWETNIGGLNWEITLDSGSFQALGLVGLQESVRYIAVLKKTTLALHHLSSGHLKWVEHLPESDSIHYQMVYSYGSGVVWALGVVPFSHVNIVKFNVEDGEIVQQVRVSTPWLQHLSGACGVVDEAVLVCPDPSSRSLQTLALETEWELRQIPLQSLDLEFGSGFQPRVLPTQPNPVDASRAQFFLHLSPSHYALLQYHYGTLSLLKNFPQTALVSFATTGEKTVAAVMACRNEVQKTSSSEDGSMGELFGEV

SEQ ID NO: 1808 - protein, 75 aa, Homo sapiens
MRGIYTAPSGLESTCLVVAYGLDIYQTRVYPSKQFDVLKDDYDYVLISSVLFGLVFATMITKRLAQVKLLNRAWR

SEQ ID NO: 1809 - protein, 136 aa, Homo sapiens
EFGTRKEEERVAMVPRLAFILFVLARDYNVTSLGQDLNWKYEAKDYRKTGELKNIGECGRSYKFLSRNQDWNTRYSHPNRPAKYSGIDEMCKAQESGLSPSKQLNRLSTLTALKVSQPVKLALFSRSPRREIRVGR

SEQ ID NO: 1810 - protein, 81 aa, Homo sapiens
  SITE (56): Xaa equals any of the naturally occurring L-amino acids
GLHFNIRVDHGMLWAPVLYKDVGQELPVVSTAPSHIALLMEPFTPDVLSRLMGRIXVCKDYVIDQLWSVLKEICQWIIPYG

SEQ ID NO: 1811 - protein, 91 aa, Homo sapiens
  SITE (78): Xaa equals any of the naturally occurring L-amino acids
MHLGLVSLILFCQALEVDISLQGPGIVPGRSEVSLSLQGPRGGGCFPIATGAPFIVLLPLGLYLVFHLCCFFGLFCAXLRLREPGWDHLII

SEQ ID NO: 1812 - protein, 230 aa, Homo sapiens
  SITE (63): Xaa equals any of the naturally occurring L-amino acids
  SITE (66): Xaa equals any of the naturally occurring L-amino acids
MGNSLSVFCSWFCRRSWPCHRQPARLVREAFPAGRAHPAAPAPVPARGIVGRFPLLFNRQRHXGPXFPVRWDGAPMRLCLIPRNTGTPQRVLRPVVWSPPSRKKPVLSPHNSIMFGHLSPVRIPCLRGKFNLQLPSLDDQVIPARLPKTEVSAEEPKEATEVKDQVETQGQEDNKRGPCSNGEAASTSRPLETQGNLTSSWYNPRPLEGNVHLKSLTEKNQTDKAQVHAV

SEQ ID NO: 1813 - protein, 232 aa, Homo sapiens
MGNSLSVFCSWFCRRSWPCHRQPARLVREAFPAGRAHPAAPAPVPARGIVGRFPLLFNRQRHLGPSFPVRWDGAPMRLCLIPRNTGTPQRVLRPVVWSPPSRKKPVLSPHNSIMFGHLSPVRIPCLRGKFNLQLPSLDDQVIPARLPKTEVSAEEPKEATEVKDQVETQGQEDNKRGPCSNGEAASTSRPLETQGNLTSSWYNPRPLEGNVHLKSLTEKNQTDKAQVHAVSC

SEQ ID NO: 1814 - protein, 156 aa, Homo sapiens
MQIQVAGLLQFAVPLFSTAEEDLLAIQLLLNSSESSLHQLTAMVDCRGLHKDYLDALAGICYDGLQGLLYLGLFSFLAALAFSTMICAGPRAWKHFTTRNRDYDDIDDDDPFNPQAWRMAAHSPPRGQLHSFCSYSSGLGSQTSLQPPAQTISNAP

SEQ ID NO: 1815 - protein, 213 aa, Homo sapiens
MQIQVAGLLQFAVPLFSTAEEDLLAIQLLLNSSESSLHQLTAMVDCRGLHKDYLDALAGICYDGLQGLLYLGLFSFLAALAFSTMICAGPRAWKHFTTRNRDYDDIDDDDPFNPQAWRMAAHSPPRGQLHSFCSYSSGLGSQTSLQPPAQTISNAPVSEYMNQAMLFGRNPRYENVPLIGRASPPPTYSPSMRATYLSVADEHLRHYGNQFPA

SEQ ID NO: 1816 - protein, 28 aa, Homo sapiens
  SITE (3): Xaa equals any of the naturally occurring L-amino acids
ECXRKPTPRAEFLQPGGSTSSRAAATAV

SEQ ID NO: 1817 - protein, 75 aa, Homo sapiens
MLNPLRQLFKLMASLFLSVFTLGLPFALFQYYAYTQFCLPGSARPIPEPLVQLAVDKGYRIAEGNEPLGASGMFH

SEQ ID NO: 1818 - protein, 280 aa, Homo sapiens
  SITE (94): Xaa equals any of the naturally occurring L-amino acids
  SITE (95): Xaa equals any of the naturally occurring L-amino acids
MHSQCQGFFSSLTMLNPLRQLFKLMASLFLSVFTLGLPFALFQYYAYTQFCLPGSARPIPEPLVQLAVDKGYRIAEGNEPPWCFWDVPLIYSYXXDVYWNVGFLKYYELKQVPNFLLAAPVAILVAWATWTYVTTHPWLCLTLGLQRSKNNKTLEKPDLGFLSPQVFVYVVHAAVLLLFGGLCMHVQVLTRFLGSSTPIMYWFPAHLLQDQEPLLRSLKTVPWKPLAEDSPPGQKVPRNPIMGLLYHWKTCSPVTRYILGYFLTYWLLGLLLHCNFLPWT

SEQ ID NO: 1819 - protein, 273 aa, Homo sapiens
MLFFCGDLLSRSQIFYYSTGMTVGIVASLLIIIFILSKFMPKKSPIYVILVGGWSFSLYLIQLVFKNLQEIWRCYWQYLLSYVLTVGFMSFAVCYKYGPLENERSINLLTWTLQLMGLCFMYSGIQIPHIALAIIIIALCTKNLEHPIQWLYITCRKVCKGAEKPVPPRLLTEEEYRIQGEVETRKALEELREFCNSPDCSAWKTVSRIQSPKRFADFVEGSSHLTPNEVSVHEQEYGLGSIIAQDEIYEEASSEEEDSYSRCPAITQNNFLT

SEQ ID NO: 1820 - protein, 96 aa, Homo sapiens
  SITE (81): Xaa equals any of the naturally occurring L-amino acids
  SITE (83): Xaa equals any of the naturally occurring L-amino acids
  SITE (84): Xaa equals any of the naturally occurring L-amino acids
  SITE (96): Xaa equals any of the naturally occurring L-amino acids
MKVAVSPAVGPGPWGSGVGGGGTVRLLLILSGCLVYGTAETDVNVVMLQESQVCEKRASQQFCYTNVLIPKWHDIWTRIQXRXXSSRLVRVTQVEX

SEQ ID NO: 1821 - protein, 273 aa, Homo sapiens; identical to SEQ ID NO: 1819

SEQ ID NO: 1822 - protein, 273 aa, Homo sapiens; identical to SEQ ID NO: 1819

SEQ ID NO: 1823 - protein, 105 aa, Homo sapiens
  SITE (69): Xaa equals any of the naturally occurring L-amino acids
MFALAWKVIFSVMLQNPIRYPSVLGIKSSLLSSLVLVMVWGNEKSGPCPTPKSRKGRRSCPAQVGRGEXGSYWDPEFRLSRKSNQGLRRDYLSLYHFNLHFRDTF

SEQ ID NO: 1824 - protein, 105 aa, Homo sapiens [sequence omitted]

SEQ ID NO: 1825 - protein, 94 aa, Homo sapiens
MLLGFLVLIPWGSLILGSSDLDPSSLPLGTRGHGWRWPPLSPVQILYPLAGDPHAAVSCSCCGETELRALLTGSLPMEAFSGLHSIEYSSRTAC

SEQ ID NO: 1826 - protein, 94 aa, Homo sapiens; identical to SEQ ID NO: 1825

SEQ ID NO: 1827 - protein, 261 aa, Homo sapiens
MAVTACQGLGFVVSLIGIAGIIAATCMDQWSTQDLYNNPVTAVFNYQGLWRSCVRESSGFTECRGYFTLLGLPAMLQAVRALMIVGIVLGAIGLLVSIFALKCIRIGSMEDSAKANMTLTSGIMFIVSGLCAIAGVSVFANMLVTNFWMSTANMYTGMGGMVQTVQTRYTFGAALFVGWVAGGLTLIGGVMMCIACRGLAPEETNYKAVSYHASGHSVAYKPGGFKASTGFGSNTKNKKRYDGGARTEDEVQSYPSKHDYV

SEQ ID NO: 1828 - protein, 261 aa, Homo sapiens
  SITE (125): Xaa equals any of the naturally occurring L-amino acids
  SITE (127): Xaa equals any of the naturally occurring L-amino acids
MAVTACQGLGFVVSLIGIAGIIAATCMDQWSTQDLYNNPVTAVFNYQGLWRSCVRESSGFTECRGYFTLLGLPAMLQAVRALMIVGIVLGAIGLLVSIFALKCIRIGSMEDSAKANMTLTSGIMXIXSGLCAIAGVSVFANMLVTNFWMSTANMYTGMGGMVQTVQTRYTFGAALFVGWVAGGLTLIGGVMMCIACRGLAPEETNYKAVSYHASGHSVAYKPGGFKASTGFGSNTKNKKRYDGGARTEDEVQSYPSKHDYV

SEQ ID NO: 1829 - protein, 92 aa, Homo sapiens
MTSLLEGRMVLCVSCLLLPLLLLLKHFNGLMTPYLAHNVYCPIEYISFFPFHEKNIEYISIWFIFDSFKFIYSRLLCISQIYVLYRAYTLPH

SEQ ID NO: 1830 - protein, 92 aa, Homo sapiens; identical to SEQ ID NO: 1829

SEQ ID NO: 1831 - protein, 92 aa, Homo sapiens; identical to SEQ ID NO: 1829

SEQ ID NO: 1832 - protein, 270 aa, Homo sapiens
  SITE (113): Xaa equals any of the naturally occurring L-amino acids
  SITE (118): Xaa equals any of the naturally occurring L-amino acids
  SITE (157): Xaa equals any of the naturally occurring L-amino acids
  SITE (268): Xaa equals any of the naturally occurring L-amino acids
GEEFQPEGSKCTKCSCTGGRTQCVREVCPILSCPQHLSHIPPGQCCPKCLGQRKVFDLPFGSCLFRSDVYDNGSSFLYDNCTACTCRDSTVVCKRKCSHPGGCDQGQEGCCEXCLLRXPPEDIKVCKFGNKIFQDGEMWSSINCTICACVKGRTECXNKQCIPISSCPQGKILNRKGCCPICTEKPGVCTVFGDPHYNTFDGRTFNFQGTCQYVLTKDCSSPASPFQVLVKNDARRTRSFSWTKSVELVLGETGSACSSTSPCAGTAXAS

SEQ ID NO: 1833 - protein, 182 aa, Homo sapiens
  SITE (104): Xaa equals any of the naturally occurring L-amino acids
  SITE (147): Xaa equals any of the naturally occurring L-amino acids
  SITE (151): Xaa equals any of the naturally occurring L-amino acids
  SITE (176): Xaa equals any of the naturally occurring L-amino acids
  SITE (179): Xaa equals any of the naturally occurring L-amino acids
MLWFSGVGALAERYCRRSPGITCCVLLLLNCSGVPMSLASSFLTGSVAKCENEGEVLQIPFITDNPCIMCVCLNKEVTCKREKCPVLSRDCALAIKQRGACCEXCKGCTYEGNTYNSSFKWQSPAEPCVLRQCQEGVVTESGVRCVXHCKXPLEHLGMCCPTCPGCVFEGVQYQEXEEXQPE

SEQ ID NO: 1834 - protein, 47 aa, Homo sapiens
SSSLLIIYVCMMDVTIYMSCVEIKGCLDAMLILLSMRKYLKKLLHNI

SEQ ID NO: 1835 - protein, 445 aa, Homo sapiens
  SITE (147): Xaa equals any of the naturally occurring L-amino acids
  SITE (288): Xaa equals any of the naturally occurring L-amino acids
  SITE (293): Xaa equals any of the naturally occurring L-amino acids
  SITE (332): Xaa equals any of the naturally occurring L-amino acids
  SITE (443): Xaa equals any of the naturally occurring L-amino acids
MLWFSGVGALAERYCRRSPGITCCVLLLLNCSGVPMSLASSFLTGSVAKCENEGEVLQIPFITDNPCIMCVCLNKEVTCKREKCPVLSRDCALAIKQRGACCEQCKGCTYEGNTYNSSFKWQSPAEPCVLRQCQEGVVTESGVRCVXHCKNPLEHLGMCCPTCPGCVFEGVQYQEGEEFQPEGSKCTKCSCTGGRTQCVREVCPILSCPQHLSHIPPGQCCPKCLGQRKVFDLPFGSCLFRSDVYDNGSSFLYDNCTACTCRDSTVVCKRKCSHPGGCDQGQEGCCEXCLLRXPPEDIKVCKFGNKIFQDGEMWSSINCTICACVKGRTECXNKQCIPISSCPQGKILNRKGCCPICTEKPGVCTVFGDPHYNTFDGRTFNFQGTCQYVLTKDCSSPASPFQVLVKNDARRTRSFSWTKSVELVLGETGSACSSTSPCAGTAXAS

SEQ ID NO: 1836 - protein, 370 aa, Homo sapiens
LGGARVRRAVGLSGTGAEAGRAGAMVEKEEAGGGISEEEAAQYDRQIRLWGLEAQKRLRASRVLLVGLKGLGAEIAKNLILAGVKGLTMLDHEQVTPEDPGAQFLIRTGSVGRNRAEASLERAQNLNPMVDVKVDTEDIEKKPESFFTQFDAVCLTCCSRDVIVKVDQICHKNSIKFFTGDVFGYHGYTFANLGEHEFVEEKTKVAKVSQGVEDGPDTKRAKLDSSETTMVKKKVVFCPVKEALEVDWSSEKAKAALKRTTSDYFLLQVLLKFRTDKGRDPSSDTYEEDSELLLQIRNDVLDSLGISPDLLPEDFVRYCFSEMAPVCAVVGGILAQEIVKALSQRDPPHNNFFFFDGMKGNGIVECLGPK

SEQ ID NO: 1837 - protein, 42 aa, Homo sapiens
MVPSVTLILHCPGFSTESHMCGKPLSPRPTRTVGRPVSNIPV

SEQ ID NO: 1838 - protein, 89 aa, Homo sapiens
  SITE (17): Xaa equals any of the naturally occurring L-amino acids
  SITE (47): Xaa equals any of the naturally occurring L-amino acids
VQGVVQALKTDHAFCPXLQGTESIRLRILEFELNQVRSVSQELPPGXPESPQTDGQPPRAWPQLGMPSNPTCFSFLPGYSGLRSSALNF

SEQ ID NO: 1839 - protein, 346 aa, Homo sapiens
MVEKEEAGGGISEEEAAQYDRQIRLWGLEAQKRLRASRVLLVGLKGLGAEIAKNLILAGVKGLTMLDHEQVTPEDPGAQFLIRTGSVGRNRAEASLERAQNLNPMVDVKVDTEDIEKKPESFFTQFDAVCLTCCSRDVIVKVDQICHKNSIKFFTGDVFGYHGYTFANLGEHEFVEEKTKVAKVSQGVEDGPDTKRAKLDSSETTMVKKKVVFCPVKEALEVDWSSEKAKAALKRTTSDYFLLQVLLKFRTDKGRDPSSDTYEEDSELLLQIRNDVLDSLGISPDLLPEDFVRYCFSEMAPVCAVVGGILAQEIVKALSQRDPPHNNFFFFDGMKGNGIVECLGPK

SEQ ID NO: 1840 - protein, 155 aa, Homo sapiens
  SITE (92): Xaa equals any of the naturally occurring L-amino acids
  SITE (105): Xaa equals any of the naturally occurring L-amino acids
  SITE (125): Xaa equals any of the naturally occurring L-amino acids
  SITE (130): Xaa equals any of the naturally occurring L-amino acids
MQHQLHLLICWGKGSKSNTSCLGPVLSCSNMWSLALLVVAGSMGVAYSSVVMYVLLWVPLPLPSHFLPSGAPEAQPTTWAQSPHSVCKCGTXLGPAKPQGPSLPXPPCLIMLLSCRRQLGLAPSXWLPGXGSHGGELRGCSQGWAPGIAHLNICT

SEQ ID NO: 1841 - protein, 42 aa, Homo sapiens
YTFQCLSQTCSYDIKCYFLVAKIILDSVIKVYWNLNFKMSPD

SEQ ID NO: 1842 - protein, 265 aa, Homo sapiens
  SITE (22): Xaa equals any of the naturally occurring L-amino acids
PKLELHRGGGRSRTSGSPGLQXFGTRRTRGRSGRAQGRLKRPGKLACRKFPGRRQRVVPELTDVLMNEILHGADGTSIKCGIIGEIGCSWPLTESERKVLQATAHAQAQLGCPVIIHPGRSSRAPFQIIRILQEAGADISKTVMSHLDRTILDKKELLEFAQLGCYLEYDLFGTELLHYQLGPDIDMPDDNKRIRRVRLLVEEGCEDRILVAHDIHTKTRLMKYGGHGYSHILTNVVPKMLLRGITENVLDKILIENPKQWLTFK

SEQ ID NO: 1843 - protein, 503 aa, Homo sapiens
MEQRHVLLKQKELGGEEPEPSLREGPGGLVMEGHLFKRASNAFKTWSRRWFTIQSNQLVYQKKYKDPVTVVVDDLRLCTVKLCPDSERRFCFEVVSTSKSCLLQADSERLLQLWVSAVQSSIASAFSQARLDDSPRGPGQGSGHLAIGSAATLGSGGMARGREPGGVGHVVAQVQSVDGNAQCCDCREPAPEWASINLGVTLCIQCSGIHRSLGVHFSKVRSLTLDSWEPELVKLMCELGNVIINQIYEARVEAMAVKKPGPSCSRQEKEAWIHAKYVEKKFLTKLPEIRGRRGGRGRPRGQPPVPPKPSIRPRPGSLRSKPEPPSEDLGSLHPGALLFRASGHPPSLPTMADALAHGADVNWVNGGQDNATPLIQATAANSLLACEFLLQNGANVNQADSAGRGPLHHATILGHTGLACLFLKRGADLGARDSEGRDPLTIAMETANADIVTLLRLAKMREAEAAQGQAGDETYLDIFRDFSLMASDDPEKLSRRSHDLHTL

SEQ ID NO: 1844 - protein, 25 aa, Homo sapiens
MSPSIRILLVLQQLGSLMAPLPSAH

SEQ ID NO: 1845 - protein, 25 aa, Homo sapiens
MSPSIRILLVLQQLGSLMAPLPSAH

SEQ ID NO: 1846 - protein, 6 aa, Homo sapiens
VFQIYL

SEQ ID NO: 1847 - protein, 6 aa, Homo sapiens
VFQIYL

SEQ ID NO: 1848 - protein, 107 aa, Homo sapiens
MLVLLLDFLGLVHLGQLLIFHIYLKAKKMTTFEYLINNRKEESSKHQAVRKDPYVQMDKGVLQQGAGALGSSAQGVKAKSSLLIHKHLCHFCTSVNQDGDSTARVHL

SEQ ID NO: 1849 - protein, 245 aa, Homo sapiens
MLQARNQSPSSQRPLDVLRRNQDPQSPASISVIIFITPKEEPALQEGLHLQEDGLPATAEDAATCLTVLSSQPASCRASCCLRADGPGMLAHTCEHSTGKWEHSTRKWEHSTGKWEHSTGKWGLTALQNGSTVLGNGSTVLGSGSTVLRSGSTVLRNGSTLLRNGSTVLGNGHTVLGNGHTVLRNGSTVLGNGSTVLGNGSPQYWERGVHSTRKWEHSTGKWEHSTGKWEHSTGKPQTWILSFSA

SEQ ID NO: 1850 - protein, 209 aa, Homo sapiens
  SITE (136): Xaa equals any of the naturally occurring L-amino acids
  SITE (161): Xaa equals any of the naturally occurring L-amino acids
  SITE (169): Xaa equals any of the naturally occurring L-amino acids
  SITE (197): Xaa equals any of the naturally occurring L-amino acids
MAMGLFRVCLVVVTAIINHPLLFPRENATVPENEEEIIRKMQAHQEKLQLEQLRLEEEVARLAAEKEALEQVAEEGRQQNETRVAWDLWSTLCMILFLMIEVWRQDHQEGPSPECLGGEEDELPGWGAPPCRASPXPTRHACHFYERCIRGATADAARTRXFLEGFVDXLLEALRSLCNRDTDMEVEDFIGVDSMYXNWQVDRPLLCHL

SEQ ID NO: 1851 - protein, 547 aa, Homo sapiens
MAMGLFRVCLVVVTAIINHPLLFPRENATVPENEEEIIRKMQAHQEKLQLEQLRLEEEVARLAAEKEALEQVAEEGRQQNETRVAWDLWSTLCMILFLMIEVWRQDHQEGPSPECLGGEEDELPGLGGAPLQGLTLPNKATLGHFYERCIRGATADAARTREFLEGFVDDLLEALRSLCNRDTDMEVEDFIGVDSMYENWQVDRPLLCHLFVPFTPPEPYRFHPELWCSGRSVPLDRQGYGQIKVVRADGDTLSCICGKTKLGEDMLCLLHGRNSMAPPCGDMENLLCATDSLYLDTMQVMKWFQTALTRAWKGIAHKYEFDLAFGQLDSPGSLKIKFRSGKFMPFNLIPVIQCDDSDLYFVSHLPREPSEGTPASSTDWLLSFAVYERHFLRTTLKALPEGACHLSCLQIASFLLSKQSRLTGPSGLSSYHLKTALLHLLLLRQAADWKAGQLDARLHELLCFLEKSLLQKKLHHFFIGNRKVPEAMGLPEAVLRAEPLNLFRPFVLQRSLYRKTLDSFYEMLKNAPALISEYSLHVPSDQPTPKS

SEQ ID NO: 1852 - protein, 213 aa, Homo sapiens
LLFLSLLQMQELLGRGAWAPGCGRRPSGWGQLACPDPLLPPHNPKSPQPGPSTSGVWGEEQGLRTLSSEHPWQGLQPLISSLKPCGHTARRDLPLAPASFQPRVLIQGPRTVPPVLLCPQHKARLHSQKCSQALEGDPASSPTAPHPTHPSAAPLLFPRDLSYTGQEAAERVSPPPSKRSCSLCQNRVWAGGRALGARPLPLPAGFSWSLCWK

SEQ ID NO: 1853 - protein, 179 aa, Homo sapiens
  SITE (91): Xaa equals any of the naturally occurring L-amino acids
  SITE (140): Xaa equals any of the naturally occurring L-amino acids
  SITE (169): Xaa equals any of the naturally occurring L-amino acids
MGMGRGAGRSALGFWPTLAFLLCSFPAATSPCKILKCNSEFWSATSGSHAPASDDTPEFCAALRSYALCTRRTARTCRGDLAYHSAVHGIXDLMSQHNCSKDGPTSQPRLRTLPPAETARSARTAPRSAITRRAFTSTRXPPTTRTVASSGTHTFRTFTDRFQTCKVQXRLAAHRQLIT

SEQ ID NO: 1854 - protein, 357 aa, Homo sapiens
  SITE (140): Xaa equals any of the naturally occurring L-amino acids
  SITE (325): Xaa equals any of the naturally occurring L-amino acids
  SITE (329): Xaa equals any of the naturally occurring L-amino acids
  SITE (335): Xaa equals any of the naturally occurring L-amino acids
  SITE (338): Xaa equals any of the naturally occurring L-amino acids
  SITE (339): Xaa equals any of the naturally occurring L-amino acids
MGMGRGAGRSALGFWPTLAFLLCSFPAATSPCKILKCNSEFWSATSGSHAPASDDTPEFCAALRSYALCTRRTARTCRGDLAYHSAVHGIEDLMSQHNCSKDGPTSQPRLRTLPPAGDSQERSDSPEICHYEKSFHKHSXTPNYTHCGLFGDPHLRTFTDRFQTCKVQGAWPLIDNNYLNVQVTNTPVLPGSAATATSKLTIIFKNFQECVDQKVYQAEMDELPAAFVDGSKNGGDKHGANSLKITEKVSGQHVEIQAKYIGTTIVVRQVGRYLTFAVRMPEEVVNAVEDWDSQGLYLCLRGCPLNQQIDFQAFHTNAEGTGARXLAAXSLDPQXPRXXHTRQAVAKCKEKLPVEDL

SEQ ID NO: 1855 - protein, 434 aa, Homo sapiens
MGMGRGAGRSALGFWPTLAFLLCSFPAATSPCKILKCNSEFWSATSGSHAPASDDTPEFCAALRSYALCTRRTARTCRGDLAYHSAVHGIEDLMSQHNCSKDGPTSQPRLRTLPPAGDSQERSDSPEICHYEKSFHKHSATPNYTHCGLFGDPHLRTFTDRFQTCKVQGAWPLIDNNYLNVQVTNTPVLPGSAATATSKLTIIFKNFQECVDQKVYQAEMDELPAAFVDGSKNGGDKHGANSLKITEKVSGQHVEIQAKYIGTTIVVRQVGRYLTFAVRMPEEVVNAVEDWDSQGLYLCLRGCPLNQQIDFQAFHTNAEGTGARRLAAASPAPTAPETFPYETAVAKCKEKLPVEDLYYQACVFDLLTTGDVNFTLAAYYALEDVKMLHSNKDKLHLYERTRDLPGRAAAGLPLAPRPLLGALVPLLALLPVFC

SEQ ID NO: 1856 - protein, 712 aa, Homo sapiens
MGQGLKAWPRYRVVGSADAGQYNLEITDAELSDDASYECQATEAALRSRRAKLTVLIPPEDTRIDGGPVILLQAGTPHNLTCRAFNAKPAATIIWFRDGTQQEGAVASTELLKDGKRETTVSQLLINPTDLDIGRVFTCRSMNEAIPSGKETSIELDVHHPPTVTLSIEPQTVQEGERVVFTCQATANPEILGYRWAKGGFLIEDAHESRYETNVDYSFFTEPVSCEVHNKVGSTNVSTLVNVHFAPRIVVDPKPTTTDIGSDVTLTCVWVGNPPLTLTWTKKDSNMGPRPPGSPPEAALSAQVLSNSNQLLLKSVTQADAGTYTCRAIVPRIGVAEREVPLYVNGPPIISSEAVQYAVRGDGGKVECFIGSTPPPDRIAWAWKENFLEVGTLERYTVERTNSGSGVLSTLTINNVMEADFQTHYNCTAWNSFGPGTAIIQLEEREVLPVGIIAGATIGASILLIFFFIALVFFLYRRRKGSRKDVTLRKLDIKVETVNREPLTMHSDREDDTASVSTATRVMKAIYSSFKDDVDLKQDLRCDTIDTREEYEMKDPTNGYYNVRAHEDRPSSRAVLYADYRAPGPARFDGRPSSRLSHSSGYAQLNTYSRGPASDYGPEPTPPGPAAPAGTDTTSQLSYENYEKFNSHPFPGAAGYPTYRLGYPQAPPSGLERTPYEAYDPIGKYATATRFSYTSQHSDYGQRFQQRMQTHV

SEQ ID NO: 1857 - protein, 81 aa, Homo sapiens [sequence omitted]

SEQ ID NO: 1858 - protein, 81 aa, Homo sapiens [sequence omitted]

SEQ ID NO: 1859 - protein, 104 aa, Homo sapiens
MYWGIFFSILNFLAFFSLVLISVLLWTGMVVFRSLDPGAELVGFESHLYHCCVTSGNLPNFPGPQFSYIENGNNKSICFIGLLREFANSIYANLLDQCLAHNSQ

SEQ ID NO: 1860 - protein, 104 aa, Homo sapiens; identical to SEQ ID NO: 1859

SEQ ID NO: 1861 - protein, 75 aa, Homo sapiens
  SITE (23): Xaa equals any of the naturally occurring L-amino acids
  SITE (36): Xaa equals any of the naturally occurring L-amino acids
  SITE (44): Xaa equals any of the naturally occurring L-amino acids
MASYKTLKMLFSCLLTCSVSNEXYAVIFNFFPLYIXFLSDCFKXFSLSLVLSNLIIIYLGVIFFIFFVLDIHRSS

SEQ ID NO: 1862 - protein, 72 aa, Homo sapiens
  SITE (1): Xaa equals any of the naturally occurring L-amino acids
  SITE (10): Xaa equals any of the naturally occurring L-amino acids
  SITE (11): Xaa equals any of the naturally occurring L-amino acids
XYTFVNSRSXXLIDFLCVIMGHLFLVHFMPDILKFKTKYCEFYLVLCWIFFVFLSTIMSFLLGCSYSHWKQF

SEQ ID NO: 1863 - protein, 75 aa, Homo sapiens
MASYKTLKMLFSCLLTCSVSNEQYAVIFNFFPLYICFLSDCFKCFSLSLVLSNLIIIYLGVIFFIFFVLDIHRSS

SEQ ID NO: 1864 - protein, 63 aa, Homo sapiens
  SITE (37): Xaa equals any of the naturally occurring L-amino acids
MRLCQRPGLVLALPPQLSFSTARGGDSRMLGLPLGRXTSGKVQGDSTTVKLRFGLQLGVLGQR

SEQ ID NO: 1865 - protein, 157 aa, Homo sapiens
GQRGRPAATSHRILSSHSLASGCPVFRGGEGTGARSTPLALLLDPKARPDPFIPWGAPASAIGMRSLKSLHKQVRDPPTCRSWATPRAIPRGCGRTQPPTDRRPESSEGAIPIPTSGEARTAIVASGKTQLEPNGPCPHCNCAENVSQMTQIGSYFF

SEQ ID NO: 1866 - protein, 47 aa, Homo sapiens
MRLCQRPGLVLALPPQLSFSTARGGDSRMLGLPLGRGTLEGQGDPQL

SEQ ID NO: 1867 - protein, 89 aa, Homo sapiens [sequence omitted]

SEQ ID NO: 1868 - protein, 89 aa, Homo sapiens [sequence omitted]

SEQ ID NO: 1869 - protein, 93 aa, Homo sapiens [sequence omitted]

SEQ ID NO: 1870 - protein, 304 aa, Homo sapiens
  SITE (98): Xaa equals any of the naturally occurring L-amino acids
  SITE (166): Xaa equals any of the naturally occurring L-amino acids
  SITE (231): Xaa equals any of the naturally occurring L-amino acids
MSSSEMWTVLWHRFSMVLRLPEEASAQEGELSLSSPPSPEPDWTLISPQGIFLSHGSILMSILKHLLCPSFLNQLRQAPHGSEFLPVVVLSVCQLLCXPFALDMDADLLIDVLADLRDSEVAAHLLQVCCYHLPLMQVELPISLLTRLALMDPTSLNQFVNTVSAXPRTIVSFLSVALLSDQPLLTSDLLSLLAHTARVLSPSHLSFIQELLAGSDESYRPLRSSWATQRXLCGHTLIGSWDTCSNTAWPCVGHCRASLDCSAFCCLGLETRILLCGAVPALLWAMQPTRLVLWDLPWQLQCPV

SEQ ID NO: 1871 - protein, 91 aa, Homo sapiens
  SITE (54): Xaa equals any of the naturally occurring L-amino acids
  SITE (71): Xaa equals any of the naturally occurring L-amino acids
  SITE (89): Xaa equals any of the naturally occurring L-amino acids
MAVMCVAGLFFIPVAGLTGFHVVLVARGRTTNEQVTGKFRGGVNPFTNGCCNNXSRVLCSSPAPRYLGRPXKEKTIVIRPPFLRPRSFXWA

SEQ ID NO: 1872 - protein, 210 aa, Homo sapiens
MAVMCVAGLFFIPVAGLTGFHVVLVARGRTTNEQVTGKFRGGVNPFTNGCCNNVSRVLCSSPAPRYLGRPKKEKTIVIRPPFLRPEVSDGQITVKIMDNGIQGELRRTKSKGSLEITESQSADAEPPPPPKPDLSRYTGLRTHLGLATNEDSSLLAKDSPPTPTMYKYRPGYSSSSTSAAMPHSSSAKVLSTLRGGVITCQLARHSGSFL

SEQ ID NO: 1873 - protein, 193 aa, Homo sapiens
  SITE (53): Xaa equals any of the naturally occurring L-amino acids
MGPLSPARTLRLWGPRSLGVALGVFMTIGFALQLLGGPFQRRLPGLQLRQPSXPSLRPALPSCPPRQRLVFLKTHKSGSSSVLSLLHRYGDQHGLRFALPARYQFGYPKLFQASRVKGYRPQGGGTQLPFHILCHHMRFNLKEVLQVMPSDSFFFSIVRDPAALARSAFSYYKSTSSAFRKSPSLAAFLANPR

SEQ ID NO: 1874 - protein, 461 aa, Homo sapiens
  SITE (28): Xaa equals any of the naturally occurring L-amino acids
  SITE (168): Xaa equals any of the naturally occurring L-amino acids
  SITE (169): Xaa equals any of the naturally occurring L-amino acids
  SITE (171): Xaa equals any of the naturally occurring L-amino acids
  SITE (178): Xaa equals any of the naturally occurring L-amino acids
  SITE (442): Xaa equals any of the naturally occurring L-amino acids
MTIGFALQLLGGPFQRRLPGLQLRQPSXPSLRPALPSCPPRQRLVFLKTHKSGSSSVLSLLHRYGDQHGLRFALPARYQFGYPKLFQASRVKGYRPQGGGTQLPFHILCHHMRFNLKEVLQVMPSDSFFFSIVRDPAALARSAFSYYKSTSSAFRKSPSLAAFLANPXXFXRPGARGXHYARNLLWFDFGLPFPPEKRAKRGNIHPPRDPNPPQLQVLPSGAGPRAQTLNPNALIHPVSTVTDHRSQISSPASFDLGSSSFIQWGLAWLDSVFDLVMVAEYFDESLVLLADALCWGLDDVVGFMHNAQAGHKQGLSTVSNSGLTAEDRQLTARARAWNNLDWALYVHFNRSLWARIEKYGQGRLQTAVAELRARREALAKHCLVGGEASDPKYITDRRFRPFQFGSAKVLGYILRSGLSPQDQEECERLATPELQYKDKLDXKQFPPTVSLPLKTSRPLSP

SEQ ID NO: 1875 - protein, 191 aa, Homo sapiens
MGPLSPARTLRLWGPRSLGVALGVFMTIGFALQLLGGPFQRRLPGLQLRQPSAPSLRPALPSCPPRQRLVFLKTHKSGSSSVLSLLHRYGDQHGLRFALPARYQFGYPKLFQASRVKGYRPQGGGTQLPFHILCHHMRFNLKEVLQVMPSDSFFFSIVRDPAGLARSAFSYYKSTSSTFRKSPSLAAFLAN

SEQ ID NO: 1876 - protein, 83 aa, Homo sapiens
  SITE (65): Xaa equals any of the naturally occurring L-amino acids
MAPAIVTLGLLLPLAPADLCLPALGSSRLPRGPPQLPSIPVSQPLPRGFLREHPQPHKLQPIPPXSQKALFLEPRRRLWPPSP

SEQ ID NO: 1877 - protein, 96 aa, Homo sapiens
MSIPMVSVLLCQAPLLIQVALPRTVAIRKKRLCLVDSILQTWHLFNFFLVGFIFQSIFRFTAKLSESTEISHLFFAPTQAKPHLLPISPTREVHLL

SEQ ID NO: 1878 - protein, 86 aa, Homo sapiens
MSFRSELAMWFQAALVSSLVLPTPPGSGGTSRRKKWIKSWRDFKQYLTHSSRHDSHQLRSSNAFLFDAQEGPSAVDIAKDEIQRQR

SEQ ID NO: 1879 - protein, 130 aa, Homo sapiens
  SITE (67): Xaa equals any of the naturally occurring L-amino acids
MLQTTLPSSQTVSLCLWVGASQPPPSFLCCQLQVFLCLLHTTRRCPSALPALVRVVPVSHCQTSWLXCGDLFLCLRSFLRSVHSSGVSPCLEQIASPFSTCLLKLWSTCDCKFSAATPEPSSSHSFTFMD

SEQ ID NO: 1880 - protein, 96 aa, Homo sapiens
MLMVRLFNSFPHALLILFLWGEQSPLTKPCPTHWAPVWMVPGPQVLWGTHWGLPGNHFCRIRSHTRRAQCPREGPFPTTLPHWGWVTGTYRGWCCL

SEQ ID NO: 1881 - protein, 122 aa, Homo sapiens
MLMVRLFNSFPHALLILFLWGEQSPLTKPCPTHWAPVWMVPGPQVLWGTHWGLPGNHFCRIRSHTRRAQCPREGPFPTTLPHWGWVTGTYRGWCCLASPACGGSWVLLPFGFVFYLSGWASF

SEQ ID NO: 1882 - protein, 122 aa, Homo sapiens; identical to SEQ ID NO: 1881

SEQ ID NO: 1883 - protein, 65 aa, Homo sapiens
MPRSSWRPAPSRPWMPWSCASSWSTSGLWTLLCTRAACTSSQRPTTTCWDQPRRLTLLCSGACSR

SEQ ID NO: 1884 - protein, 66 aa, Homo sapiens
  SITE (14): Xaa equals any of the naturally occurring L-amino acids
  SITE (28): Xaa equals any of the naturally occurring L-amino acids
SQLLGRLRQENRLXPGGGGWSERRSCHXTPAWVTERQTVSKKKKKKKNVRKEVESYFHLYFSHCLA

SEQ ID NO: 1885 - protein, 242 aa, Homo sapiens
  SITE (172): Xaa equals any of the naturally occurring L-amino acids
  SITE (197): Xaa equals any of the naturally occurring L-amino acids
  SITE (198): Xaa equals any of the naturally occurring L-amino acids
  SITE (205): Xaa equals any of the naturally occurring L-amino acids
  SITE (214): Xaa equals any of the naturally occurring L-amino acids
  SITE (228): Xaa equals any of the naturally occurring L-amino acids
  SITE (233): Xaa equals any of the naturally occurring L-amino acids
  SITE (236): Xaa equals any of the naturally occurring L-amino acids
MHRLAPHCSFARWLLCNGSLFRYKHPSEEELRALAGKPRPRGRKERWANGLSEEKPLSVPRDAPFQLETCPLTTVDALVLRFFLEYQWFVDFAVYSGGVYLFTEAYYYMLGPAKETNIAVFWCLLTVTFSIKMFLTVTRLYFSAEEGGERSVCLTFAFLFLLLAMLVQVVRXETLELGLDLAGSMTQNLEPLLKKQXXDWALPVXKLLSRDCMXLGWCFYFSWVATRXCIEKXYLXKSVCTG

SEQ ID NO: 1886 - protein, 479 aa, Homo sapiens
MAVLGVQLVVTLLTATLMHRLAPHCSFARWLLCNGSLFRYKHPSEEELRALAGKPRPRGRKERWANGLSEEKPLSVPRDAPFQLETCPLTTVDALVLRFFLEYQWFVDFAVYSGGVYLFTEAYYYMLGPAKETNIAVFWCLLTVTFSIKMFLTVTRLYFSAEEGGERSVCLTFAFLFLLLAMLVQVVREETLELGLEPGLASMTQNLEPLLKKQGWDWALPVAKLAIRVGLAVVGSVLGAFLTFPGLRLAQTHRDALTMSEDRPMLQFLLHTSFLSPLFILWLWTKPIARDFLHQPPFGETRFSLLSDSAFDSGRLWLLVVLCLLRLAVTRPHLQAYLCLAKARVEQLRREAGRIEAREIQQRVVRVYCYVTVVSLQYLTPLILTLNCTLLLKTLGGYSWGLGPAPLLSPDPSSASAAPIGSGEDEVQQTAARIAGALGGLLTPLFLRGVLAYLIWWTAACQLLASLFGLYFHQHLAGS

SEQ ID NO: 1887 - protein, 122 aa, Homo sapiens
MRHHTWLIFLILIFVEMGGQVSLCCPGCSRTPGHKPSSHLSLPMRRNYRWLRCEPPCLAFLHYLEIRWEEAFFWVGLRRHTEVPQVIGAGPLPFSPPWVVVDRSLGWDGEERSCCVSCLLFK

SEQ ID NO: 1888 - protein, 122 aa, Homo sapiens; identical to SEQ ID NO: 1887

SEQ ID NO: 1889 - protein, 92 aa, Homo sapiens
MELVFLIISLVCQHCSPDSAGDLCVQTPSVWPRTLMEIMLSSLGEFALSNNQRFVCFNNIHSSWAWWLTSVIPALWEADTGGLLEARSLRPA

SEQ ID NO: 1890 - protein, 92 aa, Homo sapiens; identical to SEQ ID NO: 1889

SEQ ID NO: 1891 - protein, 99 aa, Homo sapiens
  SITE (96): Xaa equals any of the naturally occurring L-amino acids
MFAFSPLSRLAMLGVCCGCCLGLFLESDTGINFLNFNYLASYSWSSRSSNFNNLGIFSFFFFETESRSVAQAGVQWHYLSSLQALPPGFTPFSCLXPTE

SEQ ID NO: 1892 - protein, 100 aa, Homo sapiens
MFAFSPLSRLAMLGVCCGCCLGLFLESDTGINFLNFNYLASYSWSSRSSNFNNLGIFSFFFFETESRSVAQAGVQWHYLSSLQALPPGFTPFSCLSLPSS

SEQ ID NO: 1893 - protein, 167 aa, Homo sapiens; identical to SEQ ID NO: 1674
  SITE (140): Xaa equals any of the naturally occurring L-amino acids

SEQ ID NO: 1894 - protein, 167 aa, Homo sapiens; identical to SEQ ID NO: 1674
  SITE (140): Xaa equals any of the naturally occurring L-amino acids

SEQ ID NO: 1895 - protein, 93 aa, Homo sapiens
MKEQSLPSFLWKMLLWYCLVCCDTLESFVSVFSLYPGTALGIWEALTVYGRCAQFFCFQGAKEVAVHMETFLFLECEGWGPKQVPNAAAFLLV

SEQ ID NO: 1896 - protein, 41 aa, Homo sapiens [sequence omitted]

SEQ ID NO: 1897 - protein, 93 aa, Homo sapiens; identical to SEQ ID NO: 1895

SEQ ID NO: 1898 - protein, 117 aa, Homo sapiens
  SITE (89): Xaa equals any of the naturally occurring L-amino acids
  SITE (111): Xaa equals any of the naturally occurring L-amino acids
  SITE (116): Xaa equals any of the naturally occurring L-amino acids
MTSIWHRPVCPLSWLVPSAAFSNWGPGCRAVCSPRWATPAKIPTPKCDRVAHEEGSALRVPSRVHSSSQLLRVAPASPTSSLSPVMSRXPPPSRVSVWLFVCLPTRLPVPXALPLXP

SEQ ID NO: 1899 - protein, 38 aa, Homo sapiens
ISHVLIDAYISLKRIKSSCNPTTLGMCSEDLLRLCHWS

SEQ ID NO: 1900 - protein, 88 aa, Homo sapiens
MTSIWHRPVCPLSWLVPSAAFSNWGPGCRAVCSPRWATPAKIPTPKCDRVAHEEGSALRVPSRVHSSSQLLRVAPASPTSSLSPVMSR

SEQ ID NO: 1901 - protein, 88 aa, Homo sapiens; identical to SEQ ID NO: 1900

SEQ ID NO: 1902 - protein, 113 aa, Homo sapiens
  SITE (57): Xaa equals any of the naturally occurring L-amino acids
  SITE (73): Xaa equals any of the naturally occurring L-amino acids
MNSAFSTCLLLLQDLGVPLTLTGLPPALGLAPPVLEPRAPGLELPLWGGSQAPPLPXLSSVPCSAPPLYLSVXRPLTERRCRVSRGPRWSQGQGWDLQGTRGAHGLRHLCPGS

SEQ ID NO: 1903 - protein, 117 aa, Homo sapiens
MWRVSISVPWLWSAWPISSVGFLCLPASPHPSLPPSSTLHDLAVTSGPERWRQLTAAARTVSRVRSAAGWGSWPCPASMNSCPRTVCLWNLRSIYCVCSSRLSTSCRKSPRITMPTQ

SEQ ID NO: 1904 - protein, 117 aa, Homo sapiens; identical to SEQ ID NO: 1903

SEQ ID NO: 1905 - protein, 124 aa, Homo sapiens
  SITE (118): Xaa equals any of the naturally occurring L-amino acids
MIKSAPVGPVAGGIMGCIMVLVLAVYAYRHQIHRRSHQHMSPLAAQEMSVRMSNLENDRDERDDDSHEDRGIISNTRFIAAVIERHAHSPERRRRYWGRSGTESDHGYSTMSPQEDSXKSSMQQ

SEQ ID NO: 1906 - protein, 165 aa, Homo sapiens
  SITE (145): Xaa equals any of the naturally occurring L-amino acids
  SITE (147): Xaa equals any of the naturally occurring L-amino acids
  SITE (148): Xaa equals any of the naturally occurring L-amino acids
  SITE (152): Xaa equals any of the naturally occurring L-amino acids
MAVYLLWQELGPAVLAGVAVLVFVIPINALAATKIKKLKVSLATLCVYFLLDEGNILTATKVFTSMSLFNILRIPLFELPTVISAVVQTKISLGRLEDFLNTEELLPQSIETNYTGDHAIGFTDASFSWDKTGMPVLKEALWLMXLXXPGFXIAFCKKTFSLAPS

SEQ ID NO: 1907 - protein, 50 aa, Homo sapiens
CYRCIFSIVSNRFIFSNPWISSCIFTISKQSDSIAKRQKCEFFFKLVNTC

SEQ ID NO: 1908 - protein, 84 aa, Homo sapiens
MIMSSVTLLWSILHQADSSEKMTIAASASLTTINLGATKNLRQQILELLGPISMNHGVHFMAAIAFVWNERRQNKTTTRTKVCI

SEQ ID NO: 1909 - protein, 84 aa, Homo sapiens; identical to SEQ ID NO: 1908

SEQ ID NO: 1910 - protein, 275 aa, Homo sapiens
  SITE (71): Xaa equals any of the naturally occurring L-amino acids
  SITE (153): Xaa equals any of the naturally occurring L-amino acids
MWSYHLIGLIWTSEFILACQQMTIAGAVVTCYFNRSKNDPPDHPILSSLSILFFYHQGTIVKGSFLISVVXIPRIIVMYMQNALKEQQHGALSRYLFRCCYCCFWCLDKYLLHLNQNAYTTTAINGTDFCTSAKDAFKILSKNSSHFTSINCXGDFIIFLGKVLVVCFTVFGGLMAFNYNRAFQVWAVPLLLVAFFAYLVAHSFLSVFETVLDALFLCFAVDLETNDGSSEKPYFMDQEFLSFVKRSNKLNNARAQQDKHSLRNEEGTELQAIVR

SEQ ID NO: 1911 - protein, 275 aa, Homo sapiens [sequence omitted]

SEQ ID NO: 1912 - protein, 136 aa, Homo sapiens
  SITE (133): Xaa equals any of the naturally occurring L-amino acids
MACILKRKSVIAVSFIAAFLFLLVVRLVNEVNFPLLLNCFGQPGTKWIPFSYTYRRPLRTHYGYINVKTQEPLQLDCDLCAIVSNSGQMVGQKVGNEIDRSSCIWRMNNAPTKGYEEDVGRMTMIRVVPIPAXLFC

SEQ ID NO: 1913 - protein, 64 aa, Homo sapiens
VFTSAKYYGELSLKCAILDKGLLPTLFCNFDTSIFTPINITKPQFYRWKELLFFCCSLMQFLIL

SEQ ID NO: 1914 - protein, 305 aa, Homo sapiens [sequence omitted]

SEQ ID NO: 1915 - protein, 305 aa, Homo sapiens [sequence omitted]

SEQ ID NO: 1916 - protein, 80 aa, Homo sapiens
  SITE (65): Xaa equals any of the naturally occurring L-amino acids
MDSGGWMDGDTRQAFPCPWGLVSLPLAGVTLALHVFTASALPRELRSEKDWPGQSPGPIVSVPGXQEGILEGGPGTQFAL

SEQ ID NO: 1917 - protein, 331 aa, Homo sapiens
  SITE (249): Xaa equals any of the naturally occurring L-amino acids
  SITE (257): Xaa equals any of the naturally occurring L-amino acids
  SITE (298): Xaa equals any of the naturally occurring L-amino acids
  SITE (300): Xaa equals any of the naturally occurring L-amino acids
  SITE (301): Xaa equals any of the naturally occurring L-amino acids
MDRLKSHLTVCFLPSVPFLILVSTLATAKSVTNSTLNGTNVVLGSVPVIIARTDHIIVKEGNSALINCSVYGIPDPQFKWYNSIGKLLKEEEDEKERGGGKWQMHDSGLLNITKVSFSDRGKYTCVASNIYGTVNNTVTLRVIFTSGDMGVYYMVVCLVAFTIVMVLNITRLCMMSSHLKKTEKAINEFFRTEGAEKLQKAFEIAKRIPIITSAKTLELAKVTQFKTMEFARYIEELARSVPLPPLIMXCRTIMEEXMEVVGLEEQGQNFVRHTPEGQEAADRDEVYTIPNSLKRSDXPXXVLGRLIAARATSANCHQGVSSPAVQKRACR

SEQ ID NO: 1918 - protein, 77 aa, Homo sapiens
VGSLLGSSLVALLSLPGGWLHCPKDFGNINNCRMDLYFFLLAGIQAVTALLFVWIAGRYERASQGPASHSRFSRDRG

SEQ ID NO: 1919 - protein, 91 aa, Homo sapiens [sequence omitted]

SEQ ID NO: 1920 - protein, 91 aa, Homo sapiens [sequence omitted]

SEQ ID NO: 1921 - protein, 108 aa, Homo sapiens
MSLTPPTPVLFLFLSLLWARFFLSRLKCPGGCLCWPLLLSRGSSAAPWASVPMDGAAHAAISAPGLSVQLLPRQLASPSANTELRVLLLPARVRHYLPSSFHQVLGSS

SEQ ID NO: 1922 - protein, 108 aa, Homo sapiens; identical to SEQ ID NO: 1921

SEQ ID NO: 1923 - protein, 81 aa, Homo sapiens
  SITE (29): Xaa equals any of the naturally occurring L-amino acids
SFLFFFFFFFETGFRSVFQAGVQWCDLGXLPPRFKKFSCLSLPSSWDYRHALPHPVTFFCVFLVEMAFAMLAMAGLKLLAS

SEQ ID NO: 1924 - protein, 108 aa, Homo sapiens; identical to SEQ ID NO: 1921

SEQ ID NO: 1925 - protein, 136 aa, Homo sapiens
  SITE (59): Xaa equals any of the naturally occurring L-amino acids
  SITE (111): Xaa equals any of the naturally occurring L-amino acids
MYQPHTQSWFPWCLILSSSQAGTRGLSWHLANAPVKPGMGLAFALIRLDSLLTCYLPCXHVRLVRAHTCTSPTRPLLSYQSVPAASMICPPCEIPHGEGSFEVAGRSTEMXHLPVEIPRLPGQCQQSQKTHPLAWS

SEQ ID NO: 1926 - protein, 136 aa, Homo sapiens
MYQPHTQSWFPWCLILSSSQAGTRGLSWHLANAPVKPGMGLAFALIRLDSLLTCYLPCLHVRLVRAHTCTSPTRPLLSYQSVPAASMICPPCEIPHGEGSFEVAGRSTEMSHLPVEIPRLPGQCQQSQKTHPLAWS

SEQ ID NO: 1927 - protein, 86 aa, Homo sapiens [sequence omitted]

SEQ ID NO: 1928 - protein, 99 aa, Homo sapiens [sequence omitted]

SEQ ID NO: 1929 - protein, 99 aa, Homo sapiens [sequence omitted]

SEQ ID NO: 1930 - protein, 84 aa, Homo sapiens
  SITE (65): Xaa equals any of the naturally occurring L-amino acids
MWSSSWDHRITTPRLANFFFFFFFFFFVEMGFRYVGQAGLKLLASSNLPALASQSAGITGVSHHXWLGGLIKTPILSLTPRVSG

SEQ ID NO: 1931 - protein, 178 aa, Homo sapiens [sequence omitted]

SEQ ID NO: 1932 - protein, 468 aa, Homo sapiens
  SITE (19): Xaa equals any of the naturally occurring L-amino acids
  SITE (125): Xaa equals any of the naturally occurring L-amino acids
MNSQNSGFTQRRRMALGIXILLLVDVIWVASSELTSYVFTQYNKPFFSTFAKTSMFVLYLLGFIIWKPWRQQCTRGLRGKHAAFFADAEGYFAACTTDTTMNSSLSEPLYVPVKFHDLPSEKPEXTNIDTEKTPKKSRVRFSNIMEIRQLPSSHALEAKLSRMSYPVKEQESILKTVGKLTATQVAKISFFFCFVWFLANLSYQEALSDTQVAIVNILSSTSGLFTLILAAVFPSNSGDRFTLSKLLAVILSIGGVVLVNLAGSEKPAGRDTVGSIWSLAGAMLYAVYIVMIKRKVDREDKLDIPMFFGFVGLFNLLLLWPGFFLLHYTGFEDFEFPNKVVLMCIIINGLIGTVLSEFLWLWGCFLTSSLIGTLALSLTIPLSIIADMCMQKVQFSWLFFAGAIPVFFSFFIVTLLCHYNNWDPVMVGIRRIFAFICRKHRIQRVPEDSEQCESLISMHSVSQEDGAS

SEQ ID NO: 1933 - protein, 178 aa, Homo sapiens [sequence omitted]

SEQ ID NO: 1934 - protein, 116 aa, Homo sapiens
  SITE (95): Xaa equals any of the naturally occurring L-amino acids
  SITE (112): Xaa equals any of the naturally occurring L-amino acids
MLVAWCLAPGDLLLLVIITLPRKEVTGSMSTVCQCEAQPAMLPKGHFTHHSPKAARKAQEGTRKARWVALEDSAPFHPSPGWGLILQLHPQPMNXSQSAWKHCCWKNCEEPXEGKK

SEQ ID NO: 1935 - protein, 74 aa, Homo sapiens
  SITE (69): Xaa equals any of the naturally occurring L-amino acids
KTPHSWVIHAGEASCHVERTLKQSYGAAHMRGTEAPSHQPCEPPWKWSLQHQSSFQMIAAPNTILTSIXRTSAS

SEQ ID NO: 1936 - protein, 127 aa, Homo sapiens
  SITE (85): Xaa equals any of the naturally occurring L-amino acids
  SITE (88): Xaa equals any of the naturally occurring L-amino acids
  SITE (95): Xaa equals any of the naturally occurring L-amino acids
  SITE (107): Xaa equals any of the naturally occurring L-amino acids
  SITE (123): Xaa equals any of the naturally occurring L-amino acids
MKREGRCVLHMHPSSPPSRLSFFLFLRQSLALLPRLECSGVILAQRNLRLLGSRDSPASASCCPPSSLSRRWRWREVPEGLWGLXWVXLCSLSAXWTALKGSSPPFXAKQLGHHRNGINLAEXSLPK

SEQ ID NO: 1937 - protein, 44 aa, Homo sapiens
LMPVIPAIWETEAGGLLEARSLRQPGQHSETPSLQETFKNKNSS

SEQ ID NO: 1938 - protein, 89 aa, Homo sapiens
MNHRAWPFLPFFFFFLRRSLALSPRLECSGAVSAHCGLRLPGSRHSPASASRVAGTAGARYHARLVFFVFLVETGFHRVGQDGLDLLTS

SEQ ID NO: 1939 - protein, 89 aa, Homo sapiens; identical to SEQ ID NO: 1938

SEQ ID NO: 1940 - protein, 223 aa, Homo sapiens
  SITE (159): Xaa equals any of the naturally occurring L-amino acids
  SITE (208): Xaa equals any of the naturally occurring L-amino acids
  SITE (218): Xaa equals any of the naturally occurring L-amino acids
  SITE (221): Xaa equals any of the naturally occurring L-amino acids
MLHVTRGVWGSRVRVWPLLPALLGPPRALSSLAAKMGEYRKMWNPREPRDWAQQYRERFIPFSKEQLLRLLIQALYDPINPDRETLDQPSLTDPQRLSNEQEVLRALEPLLAQANFSPLSEDTLAYALVVHHPQDEVQVTVNLDQYVYIHFWALGQPSXADAPEVQRGLQACLLSPKLPLRERRYFKRVVLASPDQNGDTWDLKKFSXTPPLGKAWEXLLXGT

SEQ ID NO: 1941 - protein, 169 aa, Homo sapiens
  SITE (4): Xaa equals any of the naturally occurring L-amino acids
  SITE (18): Xaa equals any of the naturally occurring L-amino acids
  SITE (24): Xaa equals any of the naturally occurring L-amino acids
  SITE (108): Xaa equals any of the naturally occurring L-amino acids
SPKXPPAERRYFKRVVLXARTKRXHLVLKSFKDTPLEGLEQLLPELKVRTPTLQRALLNLMLVVSGVAIFVNVGMVVLTDLKVATSLLLLLFAIFMGLRASKCRAALXSCTGCSPSKDSWPRGQVEADTQLVSACQNACPVSRLSQPRGELPFTDSSQGWHRPQECRLV

SEQ ID NO: 1942 - protein, 327 aa, Homo sapiens
MLHVTRGVWGSRVRVWPLLPALLGPPRALSSLAAKMGEYRKMWNPREPRDWAQQYRERFIPFSKEQLLRLLIQALYDPINPDRETLDQPSLTDPQRLSNEQEVLRALEPLLAQANFSPLSEDTLAYALVVHHPQDEVQVTVNLDQYVYIHFWALGQRVGQMPLKSSVGSRRVFFTKLPPAERRYFKRVVLAARTKRGHLVLKSFKDTPLEGLEQLLPELKVRTPTLQRALLNLMLVVSGVAIFVNVGMVVLTDLKVATSLLLLLFAIFMGLRASKCRAALNSCTGCSPSKDSWPRGQVEADTQLVLRLPKCVSCLEAESAQRGAAFY

SEQ ID NO: 1943 - protein, 118 aa, Homo sapiens
MKDLWFLLLVVAAPTWVLSQVRLQESGPGLVSPSQTLSLTCSVSGINIGGGKYYWAWVRQRPGEGPEWVGYISYTGVADYNPSLRGRLTISLGESNSFSLTLTSMTAADAVVYYCATD

SEQ ID NO: 1944 - protein, 174 aa, Homo sapiens
KGVFYFFIFYLPLFSWLCSRVCVFACLLSCSFFFWMKTPAFPDSPPSSVLQFSEKSWDMWEGAWELGSLRLPGRQFRLCRKEQSPWEALGEGGAAGPARMVLPATGGLRVVSAPCISPSLLTFLLCFPPSVCQRGGTGNRTAVAALSLLSTVYSGLSGDSREPGHLAAVRPLNL

SEQ ID NO: 1945 - protein, 162 aa, Homo sapiens
  SITE (115): Xaa equals any of the naturally occurring L-amino acids
  SITE (143): Xaa equals any of the naturally occurring L-amino acids
MASALSYVSKFKSFVILFVTPLLLLPLVILMPAKVCVQYMKDTNMLFLGGLIVAVAVERWNLHKRIALRTLLWVGAKPARLMLGFMGVTALLSMWISNTATTAMMVPIVEAILQXMEATSAATEAGLELVDKGKAKELPGSQXIFEGPTLGQQEDQRAEEVV

SEQ ID NO: 1946 - protein, 173 aa, Homo sapiens
  SITE (59): Xaa equals any of the naturally occurring L-amino acids
  SITE (130): Xaa equals any of the naturally occurring L-amino acids
EEPQDHTHSPYPPQDYRTFWHTLYRVLGFTPQNDPTMSTHHQNPANGPPLPPSPDAEMXMGSWRVGSEMKGTPQWAAGPIFPKPCHYLCEGGQVAEGSGCRLLYPLCLKHPPHRALVFTRFVLDSLNGNXIPWLRAKTTTYQCPCPFQLTLSSLRSSLSLWKGHPSQGRNAWS

SEQ ID NO: 1947 - protein, 407 aa, Homo sapiens
  SITE (193): Xaa equals any of the naturally occurring L-amino acids
  SITE (357): Xaa equals any of the naturally occurring L-amino acids
MASALSYVSKFKSFVILFVTPLLLLPLVILMPAKVCVQYMKDTNMLFLGGLIVAVAVERWNLHKRIALRTLLWVGAKPARLMLGFMGVTALLSMWISNTATTAMMVPIVEAILQQMEATSAATEAGLELVDKGKAKELPGSQVIFEGPTLGQQEDQERKRLCKAMTLCICYAASIGGTATLTGTGPNVVLLGXMNELFPDSKDLVNFASWFAFAFPNMLVMLLFAWLWLQFVYMRFKYVSDATVAIFVATLLFIVPSQKPKFNFRSQTEEERKTPFYPPPLLDWKVTQEKVPWGIVLLLGGGFALAKGSEASGLSVWMGKQMEPLHAVPPAAITLILSLLVAVFTECTSNVATTTLXLPIFASMVKTGVIMNIIGVFCVFLAVNTWGRAIFDLDHFPDWANVTHIET

SEQ ID NO: 1948 - protein, 162 aa, Homo sapiens
MASALSYVSKFKSFVILFVTPLLLLPLVILMPAKVCVQYMKDTNMLFLGGLIVAVAVERWNLHKRIALRTLLWVGAKPARLMLGFMGVTALLSMWISNTATTAMMVPIVEAILQQMEATSAATEAGLELVDKGKAKELPGSQVIFEGPTLGQQEDQERKRLC

SEQ ID NO: 1949 - protein, 377 aa, Homo sapiens
  SITE (327): Xaa equals any of the naturally occurring L-amino acids
MPAKVCVQYMKDTNMLFLGGLIVAVAVERWNLHKRIALRTLLWVGAKPARLMLGFMGVTALLSMWISNTATTAMMVPIVEAILQQMEATSAATEAGLELVDKGKAKELPGSQVIFEGPTLGQQEDQERKRLCKAMTLCICYAASIGGTATLTGTGPNVVLLGQMNELFPDSKDLVNFASWFAFAFPNMLVMLLFAWLWLQFVYMRFKYVSDATVAIFVATLLFIVPSQKPKFNFRSQTEEERKTPFYPPPLLDWKVTQEKVPWGIVLLLGGGFALAKGSEASGLSVWMGKQMEPLHAVPPAAITLILSLLVAVFTECTSNVATTTLXLPIFASMVKTGVIMNIIGVFCVFLAVNTWGRAIFDLDHFPDWANVTHIET

SEQ ID NO: 1950 - protein, 104 aa, Homo sapiens
  SITE (63): Xaa equals any of the naturally occurring L-amino acids
  SITE (74): Xaa equals any of the naturally occurring L-amino acids
  SITE (103): Xaa equals any of the naturally occurring L-amino acids
MSLLLLLSVLMSPGARPSDPVEVIASGPTVASSHNVQDCLHILNRYGLRAALPRSVKTVLSRXDSDPHGPHTCXHVLNVIIGSNVLALAEAQRQAEALGYKLXC

SEQ ID NO: 1951 - protein, 81 aa, Homo sapiens
QVPMSWTPTSCSCGLGDGIGHILGVQRRPTRARSDGRASQTGRWGLPPTPEDEDKPLGQFSVPVLLPWAASLLSPSPCFFL

SEQ ID NO: 1952 - protein, 295 aa, Homo sapiens
MSLLLLLSVLMSPGARPSDPVEVIASGPTVASSHNVQDCLHILNRYGLRAALPRSVKTVLSRADSDPHGPHTCGHVLNVIIGSNVLALAEAQRQAEALGYQAVVLSAAMQGDVKSMAQFYGLLAHVARTRLTPSMAGASVEEDAQLHELAAELQIPDLQLEEALETMAWGRGPVCLLAGGEPTVQLQGSGRGGRNQELALRVGAELRRWPLGPIDVLFLSGGTDGQDGPTEAAGAWVTPELASQAAAEGLDIATFLAHNDSHTFFCCLQGGAHLLHTGMTGTNVMDTHLLFLRPR

SEQ ID NO: 1953 - protein, 116 aa, Homo sapiens
MWWALCSMLPLLGCACSSGCWGSGPTPLLAEPTFLCVSSRPHNPLSFLSVLPCSRGPGPSGLQGDGAGLPAHLGPLSCICLPSLLCDLGERQCPLWAVRSTQCLIAGKKVLQRLCP

SEQ ID NO: 1954 - protein, 116 aa, Homo sapiens; identical to SEQ ID NO: 1953

SEQ ID NO: 1955 - protein, 116 aa, Homo sapiens; identical to SEQ ID NO: 1953

SEQ ID NO: 1956 - protein, 82 aa, Homo sapiens
MAIPPFIMNTLEKKAFLKRFPWMSAPIQVGLVGFCLVFATPLCCALFPQKSSMSVTSLEAELQAKIQESHPELRRVYFNKGL

SEQ ID NO: 1957 - protein, 82 aa, Homo sapiens; identical to SEQ ID NO: 1956

SEQ ID NO: 1958 - protein, 18 aa, Homo sapiens
MRFSEAWTSPWCMTLLTC

SEQ ID NO: 1959 - protein, 18 aa, Homo sapiens
MRFSEAWTSPWCMTLLTC

SEQ ID NO: 1960 - protein, 43 aa, Homo sapiens
  SITE (8): Xaa equals any of the naturally occurring L-amino acids
MSMAMGSXTLLLGWGPGPGWDCGVMRVVLCWLPGGNCQGESST

SEQ ID NO: 1961 - protein, 79 aa, Homo sapiens [sequence omitted]

SEQ ID NO: 1962 - protein, 305 aa, Homo sapiens
MPANFTEGSFDSSGTGQTLDSSPVACTETVTFTEVVEGKEWGSFYYSFKTEQLITLWVLFVFTIVGNSVVLFSTWRRKKKSRMTFFVTQLAITEKQARVLIVIAWSLSFLFSIPTLIIFGKRTLSNGEVQCWALWPDDSYWTPYMTIVAFLVYFIPLTIISIMYGIVIRTIWIKSKTYETVISNCSDGKLCSSYNRGLISKAKIKAIKYSIIIILAFICCWSPYFLFDILDNFNLLPDTQERFYASVIIQNLPALNSAINPLIYCVFSSSISFPCREQRSQDSRMTFRERTERHEMQILSKPEFI

SEQ ID NO: 1963 - protein, 43 aa, Homo sapiens
MSMAMGSSTLLLGWGPGPGWDCGVMRVVLCWLPGGNCQGESST

SEQ ID NO: 1964 - protein, 161 aa, Homo sapiens
  SITE (104): Xaa equals any of the naturally occurring L-amino acids
MPTTLPSDLMLLWLGLPSLPSPVEEEGRLVKGLRLTLAAPASEVLPDWEDPPSHPTAWAQPRTHQPDTPNSIKSGIYSPCGGAVLRGAGAIVLRKEVCPSVRLXGRPGPKWGRKRGTARVKIPAYSGWEYVQGGGAQAGVGAGGPAAAAPTRGPPHLGPYL

SEQ ID NO: 1965 - protein, 161 aa, Homo sapiens [sequence omitted]

SEQ ID NO: 1966 - protein, 92 aa, Homo sapiens
  SITE (44): Xaa equals any of the naturally occurring L-amino acids
MGPFAPTLLMLLPPLLMLVLYGCWQARGWAGHQYEHHRGPGEQXAAYFQAMRFNANMSFHAQMVINEGEAFREGQRTIPAVERPGNALRQRS

SEQ ID NO: 1967 - protein, 92 aa, Homo sapiens
MGPFAPTLLMLLPPLLMLVLYGCWQARGWAGHQYEHHRGPGEQSAAYFQAMRFNANMSFHAQMVINEGEAFREGQRTIPAVERPGNALRQRS

SEQ ID NO: 1968 - protein, 124 aa, Homo sapiens
  SITE (20): Xaa equals any of the naturally occurring L-amino acids
MWPRLAFCCWGLALVSGWAXFQQMSPSRNFSFRLFPETAPGAPGSIPAPPAPGDEAAGSRVERLGQAFRRRVRLLRELNERLELASWWMIRPAWAKSTSAASSCSSASCCPTFPWWPRAPRGHS

SEQ ID NO: 1969 - protein, 230 aa, Homo sapiens
  SITE (20): Xaa equals any of the naturally occurring L-amino acids
  SITE (79): Xaa equals any of the naturally occurring L-amino acids
  SITE (165): Xaa equals any of the naturally occurring L-amino acids
MWPRLAFCCWGLALVSGWAXFQQMSPSRNFSFRLFPETAPGAPGSIPAPPAPGDEAAGSRVERLGQAFRRRVRLLRELXERLELVFLVDDSSSVGEVNFRSELMFVRKLLSDFPVVPTATRVAIVTFSSKNYVVPRVDYISTRRARQHKCALLLQEIPAISYRGXGTYTKGAFQQAAQILLHARENSTKVVFLITDGYSKGETLAQLQRHCEIQEWRSSLLAYGKGTFES

SEQ ID NO: 1970 - protein, 89 aa, Homo sapiens
MWPRLAFCCWGLALVSGWATFQQMSPSRNFSFRLFPETAPGAPGSIPAPPAPGDEAAGSRVERLGQAFRRRVRLLRELSRAPGACLPGG

SEQ ID NO: 1971 - protein, 99 aa, Homo sapiens
  SITE (6): Xaa equals any of the naturally occurring L-amino acids
  SITE (60): Xaa equals any of the naturally occurring L-amino acids
MHVKWXLIMFLICISLESNVNGYLFMCLLFGYLLWRNVYPNLLPILNFNSCLLDLELQEXFVYSKYQTFNKYMICKCFFSHAVCYSFTFLIVFFEAQTF

SEQ ID NO: 1972 - protein, 99 aa, Homo sapiens [sequence omitted]

SEQ ID NO: 1973 - protein, 153 aa, Homo sapiens
MHTHTLSLVSLSLSHSFLLSSQVTCTLGFLVEAHLPPLRGVPDCIHHNPKTRVGGNWREQNTDLILVSLLETSSPKARSLKTNLLKTCLLKVNDLMTNLPKAQFLFWCVYIHLGVLFFFVMLWIFQGFISIHPRVLLSYYQQHKFIKFAALCK

SEQ ID NO: 1974 - protein, 153 aa, Homo sapiens; identical to SEQ ID NO: 1973

SEQ ID NO: 1975 - protein, 129 aa, Homo sapiens
  SITE (99): Xaa equals any of the naturally occurring L-amino acids
  SITE (106): Xaa equals any of the naturally occurring L-amino acids
  SITE (121): Xaa equals any of the naturally occurring L-amino acids
  SITE (123): Xaa equals any of the naturally occurring L-amino acids
  SITE (127): Xaa equals any of the naturally occurring L-amino acids
MQAGKGLAQVWGVATFVQLCAHTVFLSMYLCMHICFAAISSKVRVRVNAPFCVSVPLKVHAPLSLGIKVGLQGQKHGRATGEAGMPQGEMLGKQEPQTXSSPKPTXRREVSRNELNPVIPXAXNPFXKK

SEQ ID NO: 1976 - protein, 467 aa, Homo sapiens
  SITE (151): Xaa equals any of the naturally occurring L-amino acids
  SITE (160): Xaa equals any of the naturally occurring L-amino acids
LGPAGLRRRTKRRKRGDNSTDTTQGDPLSIHHYFHGYLAGFSVRSGRLESREVIECLYACREGLDYRDFESLGKGMKVHVNPSQSLLTLEGDDVETFNHALQHVAYMNTLRFATPGVRPLRLTTAVKCFSEESCVSIPEVEGYVVVLQPDXPQILLSGTXHFARPAVDFEGTNGVPLFPDLQITCSISHQVEAKKDESWQGTVTDTRMSDEIVHNLDGCEISLVGDDLDPERESLLLDTTSLQQRGLELTNTSAYLTIAGVESITVYEEILRQARYRLRHGAALYTRKFRLSCSEMNGRYSSNEFIVEVNVLHSMNRVAHPSHVLSSQQFLHRGHQPPPEMAGHSLASSHRNSMIPSAATLIIVVCVGFLVLMVVLGLVRIHSLHRRVSGAGGPPGASSDPKDPDLFWDDSALTIIVNPMESYQNRQSCVTGAVGGQQEDEDSSDSEVADSPSSDERRIIETPPHRY

SEQ ID NO: 1977 - protein, 231 aa, Homo sapiens
  SITE (92): Xaa equals any of the naturally occurring L-amino acids
  SITE (113): Xaa equals any of the naturally occurring L-amino acids
  SITE (116): Xaa equals any of the naturally occurring L-amino acids
MQAGKGLAQVWGVATFVQLCAHTVFLSMYLCMHICFAAISSKVRVRVNAPFCVSVPLKVHAPLSLGIKVGLQGQKHGRATGEAGMPQGEMLXKQEPQTSSSPKPTRRREVSRXELXPVIPSAATLIIVVCVGFLVLMVVLGLVRIHSLHRRVSGAGGPPGASSDPKDPDLFWDDSALTIIVNPMESYQNRQSCVTGAVGGQQEDEDSSDSEVADSPSSDERRIIETPPHRY

SEQ ID NO: 1978 - protein, 145 aa, Homo sapiens
PFTFQHDCEASPATWNYLRRMTAGFMGMAVAIILFGWIIGVLGCCWDRGLMQYVAGLLFLMGGTFCIISLCTCVAGINFELSRYPRYLYGLPDDISHGYGWSMFCAWGGLGLTLISGFFCTLAPSVQPVPRTNYPKSRPENGTVC

SEQ ID NO: 1979 - protein, 125 aa, Homo sapiens
MTAGFMGMAVAIILFGWIIGVLGCCWDRGLMQYVAGLLFLMGGTFCIISLCTCVAGINFELSRYPRYLYGLPDDISHGYGWSMFCAWGGLGLTLISGFFCTLAPSVQPVPRTNYPKSRPENGTVC

SEQ ID NO: 1980 - protein, 146 aa, Homo sapiens
VPFTFQHDCEASPATWNYLRRMTAGFMGMAVAIILFGWIIGVLGCCWDRGLMQYVAGLLFLMGGTFCIISLCTCVAGINFELSRYPRYLYGLPDDISHGYGWSMFCAWGGLGLTLISGFFCTLAPSVQPVPRTNYPKSRPENGTVC

SEQ ID NO: 1981 - protein, 109 aa, Homo sapiens
  SITE (40): Xaa equals any of the naturally occurring L-amino acids
MCSMFCERLLLLCHCQLSIAVFMYWVHVTHLSSVRRINYXFLIYKKGMQLPSWYPSSCPASRKNQVTGMNGRVVNVEDFIEQWKWLSVGWGARKGLEWEDDLYLEFGHP

SEQ ID NO: 1982 - protein, 109 aa, Homo sapiens [sequence omitted]

SEQ ID NO: 1983 - protein, 109 aa, Homo sapiens; identical to SEQ ID NO: 1981
  SITE (40): Xaa equals any of the naturally occurring L-amino acids

SEQ ID NO: 1984 - protein, 108 aa, Homo sapiens
  SITE (29): Xaa equals any of the naturally occurring L-amino acids
  SITE (37): Xaa equals any of the naturally occurring L-amino acids
  SITE (99): Xaa equals any of the naturally occurring L-amino acids
GACRGSSEPGATPRPDGEPRPLPGLHCAXGMPTPLPXSPLGLRSLRRVGWPVRKGRVGRAWGWAGLCEELQPQAPPCHESKRGRGAVAHDCNPSTLGGXSGQITRSGV

SEQ ID NO: 1985 - protein, 130 aa, Homo sapiens
  SITE (37): Xaa equals any of the naturally occurring L-amino acids
MKKFSYAFLYFPSLNFTVSTWLCTALFLLHSHHLLAXCGSTFAQVCLVSESMSPFLGRLCRTSVPCAGATAFPADSDRHCNGFPAGAEVTNRPSPWRPLVLLIPLRLGLTDINEAYVETLKVGPAVRRLP

SEQ ID NO: 1986 - protein, 16 aa, Homo sapiens
PASQKAVSAWRCPAHV

SEQ ID NO: 1987 - protein, 130 aa, Homo sapiens [sequence omitted]

SEQ ID NO: 1988 - protein, 202 aa, Homo sapiens
  SITE (176): Xaa equals any of the naturally occurring L-amino acids
  SITE (181): Xaa equals any of the naturally occurring L-amino acids
  SITE (195): Xaa equals any of the naturally occurring L-amino acids
  SITE (200): Xaa equals any of the naturally occurring L-amino acids
MALSGGLRCCRRVLSWVPVLVIVLVVLWSYYAYVFELCLVTVLSPAEKVIYLILYHAIFVFFTWTYWKSIFTLPQQPNQKFHLSYTDKERYENEERPEVQKQMLVDMAKKLPVYTRTGSGAVRFCDRCHLIKPDRCHHCSVCAMCVLKMDHHCPWVNNCIGFSNYKFFLQFLAYSXLYCLXIATTVFSYFIKYWXGELPXVA

SEQ ID NO: 1989 - protein, 96 aa, Homo sapiens [sequence omitted]

SEQ ID NO: 1990 - protein, 331 aa, Homo sapiens
  SITE (176): Xaa equals any of the naturally occurring L-amino acids
MALSGGLRCCRRVLSWVPVLVIVLVVLWSYYAYVFELCLVTVLSPAEKVIYLILYHAIFVFFTWTYWKSIFTLPQQPNQKFHLSYTDKERYENEERPEVQKQMLVDMAKKLPVYTRTGSGAVRFCDRCHLIKPDRCHHCSVCAMCVLKMDHHCPWVNNCIGFSNYKFFLQFLAYSXLYCLYIATTVFSYFIKYWRGELPSVRSKFHVLFLLFVACMFFVSLVILFGYHCWLVSRNKTTLEAFCTPVFTSGPEKNGFNLGFIKNIQQVFGDKKKFWLIPIGSSPGDGHSFPMRSMNESQNPLLANEETWEDNEDDNQDYPEGSSSLAVETET

SEQ ID NO: 1991 - protein, 235 aa, Homo sapiens
  SITE (171): Xaa equals any of the naturally occurring L-amino acids
  SITE (205): Xaa equals any of the naturally occurring L-amino acids
  SITE (210): Xaa equals any of the naturally occurring L-amino acids
  SITE (221): Xaa equals any of the naturally occurring L-amino acids
MWGLLLALAAFAPAVGPALGAPRNSVLGLAQPGTTKVPGSTPALHSSPAQPPAETANGTSEQHVRIRVIKKKKVIMKKRKKLTLTRPTPLVTAGPLVTPTPAGTLDPAEKQETGCPPLGLESLRVSDSRLEASSSQSFGLGPHRGRLNIQSGLEDGDLYDGAWCAEEQDAXPWFQVDAGHPTRFLGGITQGKELLSGGEGRLTLXQEVQXGLGLGSPGGTXDLSSPFLAGMMGSH

SEQ ID NO: 1992 - protein, 197 aa, Homo sapiens
  SITE (169): Xaa equals any of the naturally occurring L-amino acids
  SITE (187): Xaa equals any of the naturally occurring L-amino acids
  SITE (194): Xaa equals any of the naturally occurring L-amino acids
MWGLLLALAAFAPAVGPALGAPRNSVLGLAQPGTTKVPGSTPALHSSPAQPPAETANGTSEQHVRIRVIKKKKVIMKKRKKLTLTRPTPLVTAGPLVTPTPAGTLDPAEKQETGCPPLGLESLRVSDSRLEASSSQSFGLGPHRGRLNIQSGLEDGDLYDGAWCAEEQXADPWFQVDAGHPTRFSGXITQGRNXVWR

SEQ ID NO: 1993 - protein, 197 aa, Homo sapiens
MWGLLLALAAFAPAVGPALGAPRNSVLGLAQPGTTKVPGSTPALHSSPAQPPAETANGTSEQHVRIRVIKKKKVIMKKRKKLTLTRPTPLVTAGPLVTPTPAGTLDPAEKQETGCPPLGLESLRVSDSRLEASSSQSFGLGPHRGRLNIQSGLEDGDLYDGAWCAEEQDADPWFQVDAGHPTRFSGVITQGRNSVWR

SEQ ID NO: 1994 - protein, 241 aa, Homo sapiens
  SITE (229): Xaa equals any of the naturally occurring L-amino acids
  SITE (230): Xaa equals any of the naturally occurring L-amino acids
  SITE (236): Xaa equals any of the naturally occurring L-amino acids
MALRLLRRAARGAAAAALLRLKASLAADIPRLGYSSSSHHKYIPRRAVLYVPGNDEKKIKKIPSLNVDCAVLDCEDGVAANKKNEARLRIVKTLEDIDLGPTEKCVRVNSVSSGLAEEDLETLLQSRVLPSSLMLPKVESPEEIQWFADKFSFHLKGRKLEQPMNLIPFVETAMGLLNFKAVCEETLKVGPQVGLFLDAVVFGGEDFRASIGATSSKETLGYSLRPAKXXCHSETXWVSKP

SEQ ID NO: 1995 - protein, 340 aa, Homo sapiens
MALRLLRRAARGAAAAALLRLKASLAADIPRLGYSSSSHHKYIPRRAVLYVPGNDEKKIKKIPSLNVDCAVLDCEDGVAANKKNEARLRIVKTLEDIDLGPTEKCVRVNSVSSGLAEEDLETLLQSRVLPSSLMLPKVESPEEIQWFADKFSFHLKGRKLEQPMNLIPFVETAMGLLNFKAVCEETLKVGPQVGLFLDAVVFGGEDFRASIGATSSKETLDILYARQKIVVIAKAFGLQAVDLVYIDFRDGAGLLRQSREGAAMGFTGKQVIHPNQIAVVQEQFSPSPEKIKWAEELIAAFKEHQQLGKGAFTFQGSMIDMPLLKQAQNTVTLATSIKEK

SEQ ID NO: 1996 - protein, 85 aa, Homo sapiens [sequence omitted]

SEQ ID NO: 1997 - protein, 95 aa, Homo sapiens
MAPPPACRSPMSPPPPLLLLLLLSLALLGARARAEPAGSAVPAQSRPCVDCHAFEFMQRALQDLRKTACSLDARTETLLLQAERRALCACWPAGH

SEQ ID NO: 1998 - protein, 84 aa, Homo sapiens
  SITE (76): Xaa equals any of the naturally occurring L-amino acids
  SITE (78): Xaa equals any of the naturally occurring L-amino acids
  SITE (79): Xaa equals any of the naturally occurring L-amino acids
  SITE (80): Xaa equals any of the naturally occurring L-amino acids
  SITE (84): Xaa equals any of the naturally occurring L-amino acids
MLCMQTVMPQHTYLQHLVFGFCLLILCINLSVLAHRYTLCYFSMTGEYSIINGQLLVYLSNLSAQWKYRYFQTLLXLXXXGVVX

SEQ ID NO: 1999 - protein, 105 aa, Homo sapiens
MLCMQTVMPQHTYLQHLVFGFCLLILCINLSVLAHRYTLCYFSMTGEYSIINGQLLVYLSNLSAQWKYRYFQTLLVLKKKKKKKKKKKKKKKKKKKKKKKKKKKK

SEQ ID NO: 2000 - protein, 108 aa, Homo sapiens
  SITE (76): Xaa equals any of the naturally occurring L-amino acids
  SITE (106): Xaa equals any of the naturally occurring L-amino acids
MLCMQTVMPQHTYLQHLVFGFCLLILCINLSVLAHRYTLCYFSMTGEYSIINGQLLVYLSNLSAQWKYRYFQTLLXLKKKKKKKKKKKKKKKKKKKKKKKKKKKKXKK

SEQ ID NO: 2001 - protein, 75 aa, Homo sapiens
  SITE (62): Xaa equals any of the naturally occurring L-amino acids
MPLAPSPVMLILVILLLFCPSFQFLPISFYSFNVYAFAFSGISPPSCLHGWLHFIQSSFFLXYSDNILVSPSLYL

SEQ ID NO: 2002 - protein, 75 aa, Homo sapiens
MPLAPSPVMLILVILLLFCPSFQFLPISFYSFNVYAFAFSGISPPSCLHGWLHFIQSSFFLLYSDNILFSPSLYL

SEQ ID NO: 2003 - protein, 147 aa, Homo sapiens
  SITE (119): Xaa equals any of the naturally occurring L-amino acids
MWLWVWLIHTLHSGLQKPRERSLPEATFQNLLHPPTDLPSPCPLFESRCQVLPADTWLLEGRCSFHLTMQACFAVGRAVLSSSQLHTGITWRVQKLPASVKEHQCISTANIPNARLDSXQLPGPPGFSSFQELSDPGSSLNVGYKLT

SEQ ID NO: 2004 - protein, 147 aa, Homo sapiens
MWLWVWLIHTLHSGLQKPRERSLPEATFQNLLHPPTDLPSPCPLFESRCQVLPADTWLLEGRCSFHLTMQACFAVGRAVLSSSQLHTGITWRVQKLPASVKEHQCISTANIPNARLDSLQLPGPPGFSSFQELSDPGSSLNVGYKLT

SEQ ID NO: 2005 - protein, 147 aa, Homo sapiens; identical to SEQ ID NO: 2004

SEQ ID NO: 2006 - protein, 127 aa, Homo sapiens
QGYFRMDSSATQFHIETHENTSGLWSIWYRNHFDRSVVLNDVFLSKETKHMLKILNFTGPLFLPPGCWNIFSLKLAVKDIAINLFTNVFLTTNIGAIFAIPLQISHCLETRVTVGMCENNWIFKQCE

SEQ ID NO: 2007 - protein, 221 aa, Homo sapiens
  SITE (25): Xaa equals any of the naturally occurring L-amino acids
  SITE (26): Xaa equals any of the naturally occurring L-amino acids
  SITE (34): Xaa equals any of the naturally occurring L-amino acids
KGTPAGTGPEFPGRPTRPGDLWPTXXVCVTSSLXCTLENGVPCVIQESAPVHNSFIDWSATCEGQFSSAYCPLELNDYNAFPEENMNYANGFPCPADVQTDFIDHNSQSTWNTPPNMPAAWGHASFISSPPYLTSTRSLSPMSGLFGSIWAPQSDVYENCCPINPTTEHSTHMENQAVVCKEYYPGFNPFRAYMNLDIWTTTANRNANFPLSRDSSYCGNV

SEQ ID NO: 2008 - protein, 166 aa, Homo sapiens
MAGLRRPQPGCYCRTAAAVNLLLGVFQVLLPCCRPGGAQGQAIEPLPNVVELWQAEEGELLLPTQGDSEEGLEEPSQEQSFSDKLFSGKGLHFQPSVLDFGIQFLGHPVAKILHAYNPSRDSEVVVNSVFAAAGHFHVPPVPCRVIPAMGKTSSELFSYLTEEGSI

SEQ ID NO: 2009 - protein, 19 aa, Homo sapiens
IPCTRPLGFPCGSNVPWWG

SEQ ID NO: 2010 - protein, 511 aa, Homo sapiens
  SITE (171): Xaa equals any of the naturally occurring L-amino acids
  SITE (358): Xaa equals any of the naturally occurring L-amino acids
  SITE (388): Xaa equals any of the naturally occurring L-amino acids
MAGLRRPQPGCYCRTAAAVNLLLGVFQVLLPCCRPGGAQGQAIEPLPNVVELWQAEEGELLLPTQGDSEEGLEEPSQEQSFSDKLFSGKGLHFQPSVLDFGIQFLGHPVAKILHAYNPSRDSEVVVNSVFAAAGHFHVPPVPCRVIPAMGKTSFRIIFLPTEEGSIESSLXINTSSYGVLSYHVSGIGTRRISTEGSAKQLPNAYFLLPKVQSIQLSQMQAETTNTSLLQVQLECSLHNKVCQQLKGCYLESDDVLRLQMSIMVTMENFSKEFEENTQHLLDHLSIVYVATDESETSDDSAVNMYILHSGNSLIWIQDIRHFSQRDALSLQFEPVLLPTSTTNFTKIASFTCKAATSXDSGIIEDVKKTTHTPTLKACLFSSVAQGYXRMDSSATQFHIETHENTSGLWSIWYRNHFDRSVVLNDVFLSKETKHMLKILNFTGPLFLPPGCWNIFSLKLAVKDIAINLFTNVFLTTNIGAIFAIPLQISHCLETRVTVGMCENNWIFKQCE

SEQ ID NO: 2011 - protein, 317 aa, Homo sapiens [sequence omitted]

SEQ ID NO: 2012 - protein, 957 aa, Homo sapiens [sequence omitted]

SEQ ID NO: 2013 - protein, 57 aa, Homo sapiens
MWWEDLMKGLFCLWPLVRSVSSLMTSSTSCPSPPTLPPWRPCLPRLRMRVLVLLIWS

SEQ ID NO: 2014 - protein, 57 aa, Homo sapiens; identical to SEQ ID NO: 2013

SEQ ID NO: 2015 - protein, 75 aa, Homo sapiens [sequence omitted]

SEQ ID NO: 2016 - protein, 42 aa, Homo sapiens
MRLSKSNQVQLFLYFLLQWSLGSVNAETSLQILLACSFTTDS

SEQ ID NO: 2017 - protein, 169 aa, Homo sapiens
MWAVLRLALRPCARASPAGPRAYHGDSVASLGTQPDLGSALYQENYKQMKALVNQLHERVEHIKLGGGEKARALHISRGKLLPRERIDNLIDPGSPFLELSQFAGYQLYDNEEVPGGGIITGIGRVSGVECMIIANDATVKGGAYYPVTVKKQLRAQEIAMQTGSPAST

SEQ ID NO: 2018 - protein, 45 aa, Homo sapiens
MVKHFTLWMVCLSLVFRKLLSLLPKKKEGQVNFFNQKKITHFIKP

SEQ ID NO: 2019 - protein, 388 aa, Homo sapiens; identical to SEQ ID NO: 1468

SEQ ID NO: 2020 - protein, 554 aa, Homo sapiens
MGPRFTMLLAMWLVCGSEPHPHATIRGSHGGRKVPLVSPDSSRPARFLRHTGRSRGIERSTLEEPNLQPLQRRRSVPVLRLARPTEPPARSDINGAAVRPEQRPAARGSPREMIRDEGSSARSRMLRFPSGSSSPNILASFAGKNRVWVISAPHASEGYYRLMMSLLKDDVYCELAERHIQQIVLFHQAGEEGGKVRRITSEGQILEQPLDPSLIPKLMSFLKLEKGKFGMVLLKKTLQVEERYPYPVRLEAMYEVIDQGPIRRIEKIRQKGFVQKCKASGVEGQVVAEGNDGGGGAGRPSQGSEKKKEDPRRAQVPPTRESRVKVLRKLAATAPAFPQPPSTPRATTLTPAPATTVTRSTSRAGNRCCKTYDHHWLSHHAEALDPLTLPTGPLQPLRVITARRPSVSRESLPSIPGRISTGRGHRQPGGPARPTSLESFTNAPPTTISEPSTRAAGPGRFRDNRMDRREHGHRDPNVVPGPPKPAKEKPPKKKAQDKILSNEYEEKYDLSRPTASQLEDELQVGNVPLKKAKESKKHEKLEKPEKEKKKKKKK

SEQ ID NO: 2021 - protein, 509 aa, Homo sapiens; identical to SEQ ID NO: 321

SEQ ID NO: 2022 - protein, 264 aa, Homo sapiens
MCLLGALVLLGLGVLLFSGGLSESETGPMEEVERQVLPDPEVLEAVGDRQDGLREQLQAPVPPDSVPSLQNMGLLLDKLAKENQDIRLLQAQLQAQKEELQSLMHQPKGLEEENAQLRGALQQGEAFQRALESELQQLRARLQGLEADCVRGPDGVCLSGGRGPQGDKAIREQGPREQEPELSFLKQKEQLEAEAQALSLEEVAVQQTGDDDEVDDFEDFIFSHFFGDKALKKRSGKKDKHSQSPRAAGPREGHSHSHHHHHRG

SEQ ID NO: 2023 - protein, 123 aa, Homo sapiens [sequence omitted]

SEQ ID NO: 2024 - protein, 57 aa, Homo sapiens
MNCVEWWKSVFLFVVLLFVTSVSCLGVVGVAVEGSLQSCSFYSLCNKRLEHVKGIFK

SEQ ID NO: 2025 - protein, 57 aa, Homo sapiens; identical to SEQ ID NO: 2024

SEQ ID NO: 2026 - protein, 92 aa, Homo sapiens
  SITE (29): Xaa equals any of the naturally occurring L-amino acids
MEIRTRVVWLCLCLCLCLCLCLSLFSLPXSLSPLPSPLSLSVSLSLSFHGLPLMPSRSWTVLLPSQLTATSLPDSPASACRVPAIAGARHHA

SEQ ID NO: 2027 - protein, 82 aa, Homo sapiens
MNRSTRSYRCWATWPRLGWALPCCMNSLRKGRKFSQITTSLMASVSSASMVSRRRRPLPKHPVTTTSTATALLGTSSTWSKS

SEQ ID NO: 2028 - protein, 46 aa, Homo sapiens
MVTASLLLLPAVMAIVFPITWAVQSQSWAAEFNGACFQVLHGKLYS

SEQ ID NO: 2029 - protein, 176 aa, Homo sapiens
MSRGDNCTDLLALGIPSITQAWGLWVLLGAVTLLFLISLAAHLSQWTRGRSRSHPGQGRSGESVEEVPLYGNLHYLQTGRLSQDPEPDQQDPTLGGPARAAEEVMCYTSLQLRPPQGRIPGPGTPVKYSEVVLDSEPKSQASGPEPELYASVCAQTRRARASFPDQAYANSQPAAS

SEQ ID NO: 2030 - protein, 168 aa, Homo sapiens
  SITE (83): Xaa equals any of the naturally occurring L-amino acids
MPLLRGLLWLQVLCAGPLHTEAVVLLVPSDDGRAFLLRSRLLHPEAHVPPAADRGASLQCVLHQAAPKSRPRSPAAGAALLHXPRRTGDEPCREFHGNGFPGPTQLTPGECGLPAPSSLLQHASAPVRTGSEGQVVGCPRARGETGEGLSLAFLSSLMFTSRNGLVGC

SEQ ID NO: 2031 - protein, 135 aa, Homo sapiens
  SITE (118): Xaa equals any of the naturally occurring L-amino acids
  SITE (121): Xaa equals any of the naturally occurring L-amino acids
MPLLRGLLWLQVLCAGPLHTEAVVLLVPSDDGRAFLLRSRLLHPEAHVPPAADRGASLQCVLHQAAPKSRPRSPAAGAALLHRPRRTGDEPCREFHGNGFPGPTQLTPGECGLPAPSXLLXHASAPVRTVCALTW

SEQ ID NO: 2032 - protein, 168 aa, Homo sapiens
  SITE (39): Xaa equals any of the naturally occurring L-amino acids
MPLLRGLLWLQVLCAGPLHTEAVVLLVPSDDGRAFLLRXRLLHPEAHVPPAADRGASLQCVLHQAAPKSRPRSPAAGAALLHRPRRTGDEPCREFHGNGFPGPTQLTPGECGLPAPSSLLQHASAPVRTGSEGQVVGCPRARGETGEGLSLAFLSSLMFTSRNGLVGC

SEQ ID NO: 2033 - protein, 134 aa, Homo sapiens
  SITE (39): Xaa equals any of the naturally occurring L-amino acids
MPLLRGLLWLQVLCAGPLHTEAVVLLVPSDDGRAFLLRXGFFIRRRMYPPPLIEEPAFNVSYTRQPPNPGPGAQQPGPPYYTDPGGPGMNPVGNSMAMAFQVPPNSPQGSVACPPPPAYCNTPPPPYEQVVKAK

SEQ ID NO: 2034 - protein, 168 aa, Homo sapiens; identical to SEQ ID NO: 2032
  SITE (39): Xaa equals any of the naturally occurring L-amino acids

SEQ ID NO: 2035 - protein, 134 aa, Homo sapiens; identical to SEQ ID NO: 2033
  SITE (39): Xaa equals any of the naturally occurring L-amino acids

SEQ ID NO: 2036 - protein, 468 aa, Homo sapiens
MGRGWGFLFGLLGAVWLLSSGHGEEQPPETAAQRCFCQVSGYLDDCTCDVETIDRFNNYRLFPRLQKLLESDYFRYYKVNLKRPCPFWNDISQCGRRDCAVKPCQSDEVPDGIKSASYKYSEEANNLIEECEQAERLGAVDESLSEETQKAVLQWTKHDDSSDNFCEADDIQSPEAEYVDLLLNPERYTGYKGPDAWKIWNVIYEENCFKPQTIKRPLNPLASGQGTSEENTFYSWLEGLCVEKRAFYRLISGLHASINVHLSARYLLQETWLEKKWGHNITEFQQRFDGILTEGEGPRRLKNLYFLYLIELRALSKVLPFFERPDFQLFTGNKIQDEENKMLLLEILHEIKSFPLHFDENSFFAGDKKEAHKLKEDFRLHFRNISRIMDCVGCFKCRLWGKLQTQGLGTALKILFSEKLIANMPESGPSYEFHLTRQEIVSLFNAFGRISTSVKELENFRNLLQNIH

SEQ ID NO: 2037 - protein, 314 aa, Homo sapiens
  SITE (227): Xaa equals any of the naturally occurring L-amino acids
MLLAQGLILHFLGRAWTWPDALNIENSDSESWTSHTVKKFTASFEASLSGEREFKTPTISLKETIGKYSDDHEMRNEVYHRKIISWFGDSPLALFGLHQLIEYGKKSGKKAGDWYGPAVVAHILRKAVEEARHPDLQGITIYVAQDCTVPVRLGGERTNTDYLEFVKGILSLEYCVGIIGGKPKQSYYFAGFQDDSLIYMDPHYCQSFVDVSIKDFPLETFHCPSPXKMSFRKMDPSCTIGFYCRNVQDFKRASEEITKMLKFSSKEKYPLFTFVNGHSRDYDFTSTTTNEEDLFSEDEKKQLKRFSTEEFVLL

SEQ ID NO: 2038 - protein, 56 aa, Homo sapiens
MRWLFVLMLSLPLPPTPRQGPACDVPLPVSHVFSLFNSHLGARTCGVWFSLPVSVC

SEQ ID NO: 2039 - protein, 414 aa, Homo sapiens [sequence omitted]

SEQ ID NO: 2040 - protein, 200 aa, Homo sapiens
MASSLTCTGVIWALLSFLCAATSCVGFFMPYWLWGSQLGKPVSFGTFRRCSYPVHDESRQMMVMVEECGRYASFQGIPSAEWRICTIVTGLGCGLLLLVALTALMGCCVSDLISRTVGRVAGGIQFLGGLLIGAGCALYPLGWDSEEVRQTCGYTSGQFDLGKCEIGWAYYCTGAGATAAMLLCTWLACFSGKKQKHYPY

SEQ ID NO: 2041 - protein, 249 aa, Homo sapiens
MIGMSTKAVLWRCFSTVVIFLFLLDEQTSLLVLVPAGVGAAIELWKVKKALKMTIFWRGLMPEFQFGTYSESERKTEEYDTQAMKYLSYLLYPLCVGGAVYSLLNIKYKSWYSWLINSFVNGVYAFGFLFMLPQLFVNYKVRRCVLPAARPPSPVLPTADLGLSLLFQLKSVAHLPWKAFTYKAFNTFIDDVFAFIITMPTSHRLACFRDDVVFLVYLYQRWLYPVDKRRVNEFGESYEEKATRAPHTD

SEQ ID NO: 2042 - protein, 249 aa, Homo sapiens; identical to SEQ ID NO: 2041

SEQ ID NO: 2043 - protein, 60 aa, Homo sapiens
MSPTGLLVVFAPVVLGLKAITLAALLLALATSRRSPGQEDVKTTGPAGAMNTLAWSKGQE

SEQ ID NO: 2044 - protein, 60 aa, Homo sapiens; identical to SEQ ID NO: 2043

SEQ ID NO: 2045 - protein, 310 aa, Homo sapiens
MALRRPPRLRLCARLPDFFLLLLFRGCLIGAVNLKSSNRTPVVQEFESVELSCIITDSQTSDPRIEWKKIQDEQTTYVFFDNKIQGDLAGRAEILGKTSLKIWNVTRRDSALYRCEVVARNDRKEIDEIVIELTVQVKPVTPVCRVPKAVPVGKMATLHCQESEGHPRPHYSWYRNDVPLPTDSRANPRFRNSSFHLNSETGTLVFTAVHKDDSGQYYCIASNDAGSARCEEQEMEVYDLNIGGIIGGVLVVLAVLALITLGICCAYRRGYFINNKQDGESYKNPGKPDGVNYIRTDEEGDFRHKSSFVI

SEQ ID NO: 2046 - protein, 310 aa, Homo sapiens; identical to SEQ ID NO: 2045

SEQ ID NO: 2047 - protein, 310 aa, Homo sapiens; identical to SEQ ID NO: 2045

SEQ ID NO: 2048 - protein, 148 aa, Homo sapiens
MHMLNGALLALLFPVVNTRLLPFELEIYYIQHVMLYVVPIYLLWKGGAYTPEPLSSFRWALLSTGLMFFYHFSVLQILGLVTEVNLNNMLCPAISDPFYGPWYRIWASGHQTLMTMTHGKLVILFSYMAGPLCKYLLDLLRLPAKKID

SEQ ID NO: 2049 - protein, 413 aa, Homo sapiens
MLKALFLTMLTLALVKSQDTEETITYTQCTDGYEWDPVRQQCKDIDECDIVPDACKGGMKCVNHYGGYLCLPKTAQIIVNNEQPQQETQPAEGTSGATTGVVAASSMATSGVLPGGGFVASAAAVAGPEMQTGRNNFVIRRNPADPQRIPSNPSHRIQCAAGYEQSEHNVCQDIDECTAGTHNCRADQVCINLRGSFACQCPPGYQKRGEQCVDIDECRTSSYLCQYQCVNEPGKFSCMCPQGYQVVRSRTCQDINECETTNECREDEMCWNYHGGFRCYPRNPCQDPYILTPENRCVCPVSNAMCRELPQSIVYKYMSIRSDRSVPSDIFQIQATTIYANTINTFRIKSGNENGEFYLRQTSPVSAMLVLVKSLSGPREHIVDLEMLTVSSIGTFRTSSVLRLTIIVGPFSF

SEQ ID NO: 2050 - protein, 683 aa, Homo sapiens
MLFIFNFLFSPLPTPALICILTFGAAIFLWLITRPQPVLPLLDLNNQSVGIEGGARKGVSQKNNDLTSCCFSDAKTMYEVFQRGLAVSDNGPCLGYRKPNQPYRWLSYKQVSDRAEYLGSCLLHKGYKSSPDQFVGIFAQNRPEWIISELACYTYSMVAVPLYDTLGPEAIVHIVNKADIAMVICDTPQKALVLIGNVEKGFTPSLKVIILMDPFDDDLKQRGEKSGIEILSLYDAENLGKEHFRKPVPPSPEDLSVICFTSGTTGDPKGAMITHQNIVSNAAAFLKCVEHAYEPTPDDVAISYLPLAHMFERIVQAVVYSCGARVGFFQGDIRLLADDMKTLKPTLFPAVPRLLNRIYDKVQNEAKTPLKKFLLKLAVSSKFKELQKGIIRHDSFWDKLIFAKIQDSLGGRVRVIVTGAAPMSTSVMTFFRAAMGCQVYEAYGQTECTGGCTFTLPGDWTSGHVGVPLACNYVKLEDVADMNYFTVNNEGEVCIKGTNVFKGYLKDPEKTQEALDSDGWLHTGDIGRWLPNGTLKIIDRKKNIFKLAQGEYIAPEKIENIYNRSQPVLQIFVHGESLRSSLVGVVVPDTDVLPSFAAKLGVKGSFEELCQNQVVREAILEDLQKIGKESGLKTFEQVKAIFLHPEPFSIENGLLTPTLKAKRGELSKYFRTQIDSLYEHIQD

SEQ ID NO: 2051 - protein, 298 aa, Homo sapiens
MAPSGPGSSARRRCRRVLYWIPVVFITLLLGWSYYAYAIQLCIVSMENTGEQVVCLMAYHLLFAMFVWSYWKTIFTLPMNPSKEFHLSYAEKDLLEREPRGEAHQEVLRRAAKDLPIYTRTMSGAIRYCDRCQLIKPDRCHHCSVCDKCILKMDHHCPWVNNCVGFSNYKFFLLFLAYSLLYCLFIAATDLQYFIKFWTNGLPDTQAKFHIMFLFFAAAMFSVSLSSLFGYHCWLVSKNKSTLEAFRSPVFRHGTDKNGFSLGFSKNMRQVFGDEKKYWLLPIFSSLGDGCSFPTLPC

SEQ ID NO: 2052 - protein, 286 aa, Homo sapiens
MAPSGPGSSARRRCRRVLYWIPVVFITLLLGWSYYAYAIQLCIVSMENTGEQVVCLMAYHLLFAMFVWSYWKTIFTLPMNPSKEFHLSYAEKDLLEREPRGEAHQEVLRRAAKDLPIYTRTMSGAIRYCDRCQLIKPDRCHHCSVCDKCILKMDHHCPWVNNCVGFSNYKFFLLFLAYSLLYCLFIAATDLQYFIKFWTNGLPDTQAKFHIMFLFFAAAMFSVSLSSLFGYHCWLVSKNKSTLEAFRSPVFRHGTDKNGFSLGFSKNMRQVLVMRRSTGCYPFFQV

SEQ ID NO: 2053 - protein, 47 aa, Homo sapiens
MSHGSQPFLLLLSLHILILAGSFLLFSPYTAKPSFSSSFIVFPRAEM

SEQ ID NO: 2054 - protein, 914 aa, Homo sapiens [sequence omitted]

SEQ ID NO: 2055 - protein, 83 aa, Homo sapiens
MASCGLTGASLPPCCCSSFLAALKSMFWGLGSLLWSLVGILSPISSCFCVYTCLTPGSSSLFPRAVTQKLEQSVPTKALWGWM

SEQ ID NO: 2056 - protein, 68 aa, Homo sapiens
MATVGLSWKKELVILLVGPGAAALQPTHTCCSLPSLSSLFPLRLNTKTSPKTTRTNLYLLSIAPLSHL

SEQ ID NO: 2057 - protein, 73 aa, Homo sapiens
MELLKCSWQLFFSFLTHCSASTIVWLFVQHRLSQSHNKPFFGILQRCHSWHLNRESFVPNQSFSIYESCSIRK

SEQ ID NO: 2058 - protein, 85 aa, Homo sapiens
MQVFFLSEIGMLWVVVKMAHSAMLVSHTQDPTPSRWPCSLAQSILLTCSPQHRFSLERKIQLPPRRWWAEGREGCWVRERVGERT

SEQ ID NO: 2059 - protein, 51 aa, Homo sapiens
MLTLTHFVSYDYFIVKRLVGWLVGWLVCFVLVSPFIHSLSTNYNFLCFMCG

SEQ ID NO: 2060 - protein, 354 aa, Homo sapiens
MAPAKATNVVRLLLGSTALWLSQLGSGTVAASKSVTAHLAAKWPETPLLLEASEFMAEESNEKFWQFLETVQELAIYKQTESDYSYYNLILKKAGQFLDNLHINLLKFAFSIRAYSPAIQMFQQIAADEPPPDGCNAFVVIHKKHTCKINEIKKLLKKAASRTRPYLFKGDHKFPTNKENLPVVILYAEMGTRTFSAFHKVLSEKAQNEEILYVLRHYIQKPSSRKMYLSGYGVELAIKSTEYKALDDTQVKTVTNTTVEDETETNEVQGFLFGKLKEIYSDLRDNLTAFQKYLIESNKQMMPLKVWELQDLSFQAASQIMSAPVYDAIKLMKDISQNFPIKARVQMIGNVLIG

SEQ ID NO: 2061 - protein, 157 aa, Homo sapiens
MQAPRAALVFALVIALVPVGRGNYEELENSGDTTVESERPNKVTIPSTFAAVTIKETLNANINSTNFAPDENQLEFILMVLIPLILLVLLLLSVVFLATYYKRKRTKQEPSSQGSQSALQTCEYYPKTCLQVGVGLEKEQRCFKIKQQGLHIIVSDK

SEQ ID NO: 2062 - protein, 67 aa, Homo sapiens
MVLGFVLLLFNMGGTFSDGRKERRRTTFLRCCDFIMKPSPALILVTSVGPVLLQNASWVSVCRTLLS

SEQ ID NO: 2063 - protein, 43 aa, Homo sapiens
MYFFFFLTFLALWVMGTTAMASPFFMGYQLQYGPQCCSGHFND

SEQ ID NO: 2064 - protein, 57 aa, Homo sapiens
MCEGWLHPIFLYCCFWTTTPSCSAFGILDLHQQHPIPTPSSWFSGLCPWTELHHCLR

SEQ ID NO: 2065 - protein, 51 aa, Homo sapiens
MIICLIMFYFIALAGAHKRVVIQLREQLSLESRDKCYLIQKLTEAQRDMRN

SEQ ID NO: 2066 - protein, 366 aa, Homo sapiens
MACLKTQRAPKAFLLLPLLLYFAGLSKLTQLQVCSGTDEDPDDKNAPFRQRPFCKYKGHTADLLDLSWSKNYFLLSSSMDKTVRLWHISRRECLCCFQHIDFVTAIAFHPRDDRYFLSGSLDGKLRLWNIPDKKVALWNEVDGQTKLITAANFCQNGKYAVIGTYDGRCIFYDTEHLKYHTQIHVRSTRGRNKVGRKITGIEPLPGENKILVTSNDSRIRLYDLRDLSLSMKYKGYVNSSSQIKASFSHDFTYLVSGSEDKYVYIWSTYHDLSKFTSVRRDRNDFWEGIKAHNAVVTSAIFAPNPSLMLSLDVQSEKSEGNEKSEDAEVLDATPSGIMKTDNTEVLLSADFTGAIKVFVNKRKNVS

SEQ ID NO: 2067 - protein, 187 aa, Homo sapiens
MVAATVAAAWLLLWAAACAQQEQDFYDFKAVNIRGKLVSLEKYRGSVSLVVNVASECGFTDQHYRALQQLQRDLGPHHFNVLAFPCNQFGQQEPDSNKEIESFARRTYSVSFPMFSKIAVTGTGAHPAFKYLAQTSGKEPTWNFWKYLVAPDGKVVGAWDPTVSVEEVRPQITALVRKLILLKREDL

SEQ ID NO: 2068 - protein, 346 aa, Homo sapiens [sequence omitted]

SEQ ID NO: 2069 - protein, 47 aa, Homo sapiens
MRLSRAAHNLQTILYSVFCLCLHVAMMDRSPSSILALWRSGSCSVEI

SEQ ID NO: 2070 - protein, 102 aa, Homo sapiens
MLLHWLLQNELQSAVASCLVSISLGKEDFLQTGCKVKSHVGVIHRREKGGAIYLPNSLVLPTSHWIRLSYRNRHRGFILWTLMSTWEARCHGPCVMFDFNQK

SEQ ID NO: 2071 - protein, 144 aa, Homo sapiens
  SITE (138): Xaa equals any of the naturally occurring L-amino acids
MVTLAELLVLLAALLATVSGYFVSIDAHAEECFFERVTSGTKMGLIFEVAEGGFLDIDVEVRASCPQLRLGRVATRGLVAPGTGAGPVWGVGLEVAVRVLEKPRPPPPAPPRPRRPPNGPFSRDLPGFRDPLGAPSAXLVALGF

SEQ ID NO: 2072 - protein, 12 aa, Homo sapiens
MGSSLAFILFLP

SEQ ID NO: 2073 - protein, 201 aa, Homo sapiens
MVTLAELLVLLAALLATVSGYFVSIDAHAEECFFERVTSGTKMGLIFEVAEGGFLDIDVEITGPDNKGIYKGDRESSGKYTFAAHMDGTYKFCFSNRMSTMTPKIVMFTIDIGEAPKGQDMETEAHQNKLEEMINELAVAMTAVKHEQEYMEVRERIHRAINDNTNSRVVLWSFFEALVLVAMTLGQIYYLKRFFEVRRVV

SEQ ID NO: 2074 - protein, 45 aa, Homo sapiens
MLSASIWLVLIISRGNARQKVKLCFLLMLLATWKRRRGRGKRGRS

SEQ ID NO: 2075 - protein, 201 aa, Homo sapiens; identical to SEQ ID NO: 2073

SEQ ID NO: 2076 - protein, 201 aa, Homo sapiens; identical to SEQ ID NO: 2073

SEQ ID NO: 2077 - protein, 587 aa, Homo sapiens
MWRLGCLIWEVFNGPLPRAAALRNPGKIPKTLVPHYCELVGANPKVRPNPARFLQNCRAPGGFMSNRFVETNLFLEEIQIKEPAEKQKFFQELSKSLDAFPEDFCRHKVLPQLLTAFEFGNAGAVVLTPLFKVGKFLSAEEYQQKIIPVVVKMFSSTDRAMRIRLLQQMEQFIQYLDEPTVNTQIFPHVVHGFLDTNPAIREQTVKSMLLLAPKLNEANLNVELMKHFARLQAKDEQGPIRCNTTVCLGKIGSYLSASTRHRVLTSAFSRATRDPFAPSRVAGVLGFAATHNLYSMNDCAQKILPVLCGLTVDPEKSVRDQAFKAIRSFLSKLESVSEDPTQLEEVEKDVHAASSPGMGGAAASWAGWAVTGVSSLTSKLIRSHPTTAPTETNIPQRPTPEGHWETQEEDKDTAEDSSTADRWDDEDWGSLEQEAESVLAQQDDWSTGGQVSRASQVSNSDHKSSKSPESDWSSWEAEGSWEQGWQEPSSQEPPPDGTRLASEYNWGGPESSDKGDPFATLSARPSTQPRPDSWGEDNWEGLETDSRQVKAELARKKREERRREMEAKRAERKVAKGPMKLGARKLD

SEQ ID NO: 2078 - protein, 124 aa, Homo sapiens
MRQVAPARRAQLEHSGLHASLCLLSLLSLLPTLEANMSGFHQAPLTLLPSCTQGDGEARGHHTQPSFWRTEMKCPVEALLEHLATRAVVGRNGDHGAQQEHRTASEGQQQPLAESSPWWQPPHG

SEQ ID NO: 2079 - protein, 74 aa, Homo sapiens [sequence omitted]

SEQ ID NO: 2080 - protein, 76 aa, Homo sapiens
MVVDLFFYLLCIFLVLWVLEAMIKHLMYSDMSALIASFSSFLNCIHYFQNRYRYSVPPFELLACSCFPLSPKQGFF

SEQ ID NO: 2081 - protein, 146 aa, Homo sapiens
MAALLLLPLLLLLPLLLLKLHLWPQLRWLPAATAARGALEKASGQRREPEMQRPEAARSLPEGTVPPEVEEPPPLCHLEQLWRCSSPLAQSFCGSGSGWPRPACALPLCPPPCAGAPCCTASAAAARARWCWRQSFWSPWSRTCPP

SEQ ID NO: 2082 - protein, 30 aa, Homo sapiens
  SITE (28): Xaa equals any of the naturally occurring L-amino acids
MRLFSQMLKSWMALFMRNVWLEMTIATXIQ

SEQ ID NO: 2083 - protein, 56 aa, Homo sapiens
MRLFSQMLKSWMALFMRNVWLEMTIATAHTVSTVHWRKWTKMLVQSPTQVKMNVSQ

SEQ ID NO: 2084 - protein, 563 aa, Homo sapiens
MGSLSNYALLQLTLTAFLTILVQPQHLLAPVFRTLSILTNQSNCWLCEHLDNAEQPELVFVPASASTWWTYSGQWMYERVWYPQAEVQNHSTSSYRKVTWHWEASMEAQGLSFAQVRLLEGNFSLCVENKNGSGPFLGNIPKQYCNQILWFDSTDGTFMPSIDVTNESRNDDDDPSVCLGTRQCSWFAGCTNRTWNSSAVPLIGLPNTQDYKWVDRNSGLTWSGNDTCLYSCQNQTKGLLYQLFRNLFCSYGLTEAHGKWRCADASITNDKGHDGHRTPTWWLTGSNLTLSVNNSGLFFLCGNGVYKGFPPKWSGRCGLGYLVPSLTRYLTLNASQITNLRSFIHKVTPHRCTQGDTDNPPLYCNPKDNSTIRALFPSLGTYDLEKAILNISKAMEQEFSATKQTLEAHQSKVSSLASASRKDHVLDIPTTQRQTACGTVGKQCCLYINYSEEIKSNIQRLHEASENLKNVPLLDWQGIFAKVGDWFRSWGYVLLIVLFCLFIFVLIYVRVFRKSRRSLNSQPLNLALSPQQSAQLLVSETSCQVSNRAMKGLTTHQYDTSLL

SEQ ID NO: 2085 - protein, 599 aa, Homo sapiens
MELLGPVPPEQQFINQKMRPGSGMLSIRVIPDGPTRALQITDFCHRKSSRSYEVDELPVTEQELQKLKNPDTEQELEVLVRLEGGIGLSLINKVPEELVFASLTGINVHYTQLATSHMLELSIQDVQVDNQLIGTTQPFMLYVTPLSNENEVIETGPAVQVNAVKFPSKSALTNIYKHLMITAQRFTVQIEEKLLLKLLSFFGYDQAESEVEKYDENLHEKTAEQGGTPIRYYFENLKISIPQIKLSVFTSNKLPLDLKALKSTLGFPLIRFEDAVINLDPFTRVHPYETKEFIINDILKHFQEELLSQAARILGSVDFLGNPMGLLNDVSEGVTGLIKYGNVGGLIRNVTHGVSNSAGKFAGTLSDGLGKTMDNRHQSEREYIRYHAATSGEHLVAGIHGLAHGIIGGLTSVITSTVEGVKTEGGVSGFISGLGKGLVGTVTKPVAGALDFASETAQAVRDTATLSGPRTQAQRVRKPRCCTGPQGLLPRYSESQAEGQEQLFKLTDNIQDEFFIAVENIDSYCVLISSKAVYFLKSGDYVDREAIFLEVKYDDLLPLPCLQRPWEGVCAGDQESREHEQWSVHPRPLPPEAHGPCEI

SEQ ID NO: 2086 - protein, 239 aa, Homo sapiens
MAPLLPSLPLHLHTSLCLRLCLSLSLSAWLSWSLPLCVSLSASYPAWRLLPQLHGRSREQRYTKLADWQYIEECVQAASPMPLFGNGDILSFEDANRAMQTGVTGIMIARGALLKPWLFTEIKEQRHWDISSSERLDILRDFTNYGLEHWGSDTQGVEKTRRFLLEWLSFLCRYVPVGLLERLPQRINERPPYYLGRDYLETLMASQKAADWIRISEMLLGPVPPSFAFLPKHKANAYK

SEQ ID NO: 2087 - protein, 127 aa, Homo sapiens [sequence omitted]

SEQ ID NO: 2088 - protein, 138 aa, Homo sapiens
MKMMVVLLMLSSLSRLLGLMRPSSLRQYLDSVPLPPCQEQQPKASAELDHKACYLCHSLLMLAGVVVSCQDITPDQWGELQLLCMQLDRHISTQIRESPQAMHRTMLKDLATQTYIRWQELLTHCQPQAQYFSPWKDI

SEQ ID NO: 2089 - protein, 132 aa, Homo sapiens [sequence omitted]

SEQ ID NO: 2090 - protein, 127 aa, Homo sapiens
  SITE (107): Xaa equals any of the naturally occurring L-amino acids
  SITE (109): Xaa equals any of the naturally occurring L-amino acids
  SITE (116): Xaa equals any of the naturally occurring L-amino acids
MFLLRPLPILLVTGGGYAGYRQYEKYRERELEKLGLEIPPKLAGHWEVALYKSVPTRLLSRAWGRLNQVELPHWLRRPVYSLYIWTFGVNMKEAAVEDLHHYRNLSXFXRRKLKAXGPACLWPAQRD

SEQ ID NO: 2091 - protein, 89 aa, Homo sapiens
  SITE (87): Xaa equals any of the naturally occurring L-amino acids
MFLLRPLPILLVTGGGYAGYRQYEKYRERELEKLGLEIPPKLAGHWEVALYKSVPTRLLSRAWGRLNQVELPHWLRRPVYSLYIWTXGG

SEQ ID NO: 2092 - protein, 90 aa, Homo sapiens [sequence omitted]

SEQ ID NO: 2093 - protein, 110 aa, Homo sapiens
  SITE (98): Xaa equals any of the naturally occurring L-amino acids
  SITE (100): Xaa equals any of the naturally occurring L-amino acids
MAAPALGLVCGRCPELGLVLLLLLLSLLCGAAGSQEAGTGAGAGSLAGSCGCGTPQRPGAHGSSAAAHRYSREANAPGPVPGERQLAHSKVLHRFLRXGXGLLGSWTGLE

SEQ ID NO: 2094 - protein, 374 aa, Homo sapiens
MAAPALGLVCGRCPELGLVLLLLLLSLLCGAAGSQEAGTGAGAGSLAGSCGCGTPQRPGAHGSSAAAHRYSREANAPGPVPGERQLAHSKMVPIPAGVFTMGTDDPQIKQDGEAPARRVTIDAFYMDAYEVSNTEFEKFVNSTGYLTEAEKFGDSFVFEGMLSEQVKTNIQQAVAAAPWWLPVKGANWRHPEGPDSTILHRPDHPVLHVSWNDAVAYCTWAGKRLPTEAEWEYSCRGGLHNRLFPWGNKLQPKGQHYANIWQGEFPVTNTGEDGFQGTAPVDAFPPNGYGLYNIVGNAWEWTSDWWTVHHSVEETLNPKGPPSGKDRVKKGGSYMCHRSYCYRYRCAARSQNTPDSSASNLGFRCAADRLPTMD

SEQ ID NO: 2095 - protein, 53 aa, Homo sapiens
MSTFVCVCVFCFVLRSEARAKRKQDQRNTKRCLLTKGQRDLSVNQSKINRTAN

SEQ ID NO: 2096 - protein, 215 aa, Homo sapiens
  SITE (7): Xaa equals any of the naturally occurring L-amino acids
MLPWTAXGLALSLRLALARSGAERGPPASAPRGDLMFLLDSSASVSHYEFSRVREFVGQLVAPLPLGTGALRASLVHVGSRPYTEFPFGQHSSGEAAQDAVRASAQRMGDTHTGLALVYAKEQLFAEASGARPGVPKVLVWVTDGGSSDPVGPPMQELKDLGVTVFIVSTGRGNFLELSAAASAPAEKHLHFVDVDDLHIIVQELRGSILDAMRP

SEQ ID NO: 2097 - protein, 127 aa, Homo sapiens
MVPGAAGWCCLVLWLPACVAAHGFRIHDYLYFQVLSPGDIRYIFTATPAKDFGGIFHTRYEQIHLVPAEPPEACGELSNGFFIQDQIALVERGGCSFLSKTRVVQEHGGRAVIISDNALTMTASTWR

SEQ ID NO: 2098 - protein, 188 aa, Homo sapiens; identical to SEQ ID NO: 1359

SEQ ID NO: 2099 - protein, 72 aa, Homo sapiens
MLVLFKFLPLTSSGRFLSVTLYHRVHHQTFFAGAKSFSPASTLNLYICSSQFQSLQKLYCGVIPVLRYASIE

SEQ ID NO: 2100 - protein, 112 aa, Homo sapiens
MAYLTLFQMGSWMSFSLSLCSLLFILTGHCLSENFYVRGDGTRAYFFTKGEVHSMFCKASLDEKQNLVDRRLQVNRKKQVKMHRVWIQGKFQKPLHQTQNSSNMVSTLLSQD

SEQ ID NO: 2101 - protein, 80 aa, Homo sapiens
MGWIDLLLPELGALRVFLHLFLVALRTKRWIFRTLGQLTCVNILGDSRKKRECRLNKRQLQFGEKTLQVPERLVVRHSPF

SEQ ID NO: 2102 - protein, 49 aa, Homo sapiens
MQVSSWVVFQLVWNSLVLTQTGIKHYFRFSLCQFLSSYNHVNQDVRTSI

SEQ ID NO: 2103 - protein, 179 aa, Homo sapiens
  SITE (143): Xaa equals any of the naturally occurring L-amino acids
MAQVLASELSLVAFILLLVMAFSKKWLDLSRSLFYQRWPVDVSNRIHTSAHVMSMGLLHFCKSRSCSDLENGKVTFIFSTLMLFPINIWIFELERNVSIPIGWSYFIGWLVLILYFTCAILCYFNHKSFWSLILSHPSGAVSXSSSFGSVEESPRAQTITDTPITQEGVLDPEQKDTHV

SEQ ID NO: 2104 - protein, 122 aa, Homo sapiens
MPPLAPQLCRAVFLVPILLLLQVKPLNGSPGPKDGSQTEKTPSADQNQEQFEEHFVASSVGEMWQVVDMAQQEEDQSSKTAAVHKHSFHLSFCFSLASVMVFSGGPLRRTFPNIQLCFMLTH

SEQ ID NO: 2105 - protein, 122 aa, Homo sapiens; identical to SEQ ID NO: 2104

SEQ ID NO: 2106 - protein, 459 aa, Homo sapiens
  SITE (321): Xaa equals any of the naturally occurring L-amino acids
  SITE (345): Xaa equals any of the naturally occurring L-amino acids
MGGPRAWALLCLGLLLPGGGAAWSIGAAPFSGRRNWCSYVVTRTISCHVQNGTYLQRVLQNCPWPMSCPGSSYRTVVRPTYKVMYKIVTAREWRCCPGHSGVSCEEVAASSASLEPMWSGSTMRRMALRPTAFSGCLNCSKVSELTERLKVLEAKMTMLTVIEQPVPPTPATPEDPAPLWGPPPAQGSPGDGGLQDQVGAWGLPGPTGPKGDAGSRGPMGMRGPPGPQGPPGSPGRAGAVGTPGERGPPGPPGPPGPPGPPAPVGPPHARISQHGDPLLSNTFTETNNHWPQGPTGPPGPPGPMGPPGPPGPTGVPGSPGXIGPPGPTGPKGISGHPGEKGEKKXLRGEPGPQGSAGQRGEPGPKGDPGEKSHWNQSWGLGGPCRHRHPQPPSGQEGGHATNYRDRGPQEPGRERLRVVAAPEADQARLPLLPGLGQLPPGTARPYLLMSSGSLLPSRP

SEQ ID NO: 2107 - protein, 615 aa, Homo sapiens [sequence omitted]

SEQ ID NO: 2108 - protein, 404 aa, Homo sapiens
  SITE (41): Xaa equals any of the naturally occurring L-amino acids
  SITE (77): Xaa equals any of the naturally occurring L-amino acids
  SITE (96): Xaa equals any of the naturally occurring L-amino acids
  SITE (98): Xaa equals any of the naturally occurring L-amino acids
  SITE (108): Xaa equals any of the naturally occurring L-amino acids
  SITE (122): Xaa equals any of the naturally occurring L-amino acids
  SITE (124): Xaa equals any of the naturally occurring L-amino acids
  SITE (126): Xaa equals any of the naturally occurring L-amino acids
  SITE (175): Xaa equals any of the naturally occurring L-amino acids
  SITE (192): Xaa equals any of the naturally occurring L-amino acids
  SITE (210): Xaa equals any of the naturally occurring L-amino acids
  SITE (236): Xaa equals any of the naturally occurring L-amino acids
  SITE (239): Xaa equals any of the naturally occurring L-amino acids
  SITE (309): Xaa equals any of the naturally occurring L-amino acids
  SITE (335): Xaa equals any of the naturally occurring L-amino acids
  SITE (389): Xaa equals any of the naturally occurring L-amino acids
MHPIPSSFMIKAVSSFLTAEEASVGNPEGAFMKVLQARKNXTSTELIVEPEEPSDSSGINLSGFGSEQLDTNDESDXISTLSYILPYFSAVNLDVXSXLLPFIKLPTXGNSLAKIQTVGQNXQXVXRVLMGPRSIQKRHFKEVGRQSIRREQGAQASVENAAEEKRLGSPAPREXEQPHTQQGPEKLAGNAXYTKPSFTQEHKAAVSVLXPFSKGAPSTSSPAKALPQVRDRWKDXTHXISILESAKARVTNMKASKPISHSRKKYRFHKTRSRMTHRTPKVKKSPKFRKKSYLSRLMLANRPPFSAAXSLINSPSQGAFSSLGDLSPQENPFLXVSAPSEHFIETTNIKDTTARNALEENVFMENTNMPEVTISENTNYNHPPEADSXGTAFNLGPTVKQTET

SEQ ID NO: 2109 - protein, 45 aa, Homo sapiens
MVTSGMLVFSIKTFSSKAFLAVVSFILVVSIKCSEGADTSRKGFS

SEQ ID NO: 2110 - protein, 45 aa, Homo sapiens; identical to SEQ ID NO: 2109

SEQ ID NO: 2111 - protein, 257 aa, Homo sapiens
MEMIIQFGFVTLFVASFPLAPLFALLNNIIEIRLDAKKFVTELRRPVAVRAKDIGIWYNILRGIGKLAVIINAFVISFTSDFIPRLVYLYMYSKNGTMHGFVNHTLSSFNVSDFQNGTAPNDPLDLGYEVQICRYKDYREPPWSENKYDISKDFWAVLAARLAFVIVFQNLVMFMSDFVDWVIPDIPKDISQQIHKEKVLMVELFMREEQDKQQLLETWMEKERQKDEPPCNHHNTKACPDSLGSPAPSHAYHGGVL

SEQ ID NO: 2112 - protein, 50 aa, Homo sapiens
MTHGCLSLASMAAGLGSVSLFLFVQQWTPTTASTGETPSSWQKTTSCVRR

SEQ ID NO: 2113 - protein, 50 aa, Homo sapiens; identical to SEQ ID NO: 2112

SEQ ID NO: 2114 - protein, 74 aa, Homo sapiens [sequence omitted]

SEQ ID NO: 2115 - protein, 94 aa, Homo sapiens
MWPWWLMVERTVVLLLITYLVPVGGSAVGPPGPGCNVSTSPPPPATRCPDESELYRDPGEAPLEADQAERGAAHEGGHPGRDPWGARRGPPRCG

SEQ ID NO: 2116 - protein, 180 aa, Homo sapiens
MAICSCQCPAAMAFCFLETLWWEFTASYDTTCIGLASRPYAFLEFDSIIQKVKWHFNYVSSSQMECSLEKIQEELKLQPPAVLTLEDTDVANGVMNGHTPMHLEPAPNFRMEPVTALGILSLILNIMCAALNLIRGVHLAEHSLQVAHEEIGNILAFLVPFVACIFQDPRSWFCWLDQTS

SEQ ID NO: 2117 - protein, 80 aa, Homo sapiens
MWPRMLAFSTWLEWLLFSPLPQSVGCPGPLEFYCVQDRRPPSLPDGADHFSSPTRITSSSISPALSLQAPEAGGFLSIPG

SEQ ID NO: 2118 - protein, 21 aa, Homo sapiens
MHDVLFFLSFSLVACVKAGML

SEQ ID NO: 2119 - protein, 291 aa, Homo sapiens
MDFIQHLGVCCLVALISVGLLSVAACWFLPSIIAAAASWIITCVLLCCSKHARCFILLVFLSCGLREGRNALIAAGTGIVILGHVENIFHNFKGLLDGMTCNLRAKSFSIHFPLLKKYIEAIQWIYGLATPLSVFDDLVSWNQTLAVSLFSPSHVLEAQLNDSKGEVLSVLYQMATTTEVLSSLGQKLLAFAGLSLVLLGTGLFMKRFLGPCGWKYENIYITRQFVQFDERERHQQRPCMLPLNKEERRKNKELKILSMILPLIYLCLNPTVSQNQNSFYLRPGFLSVLFF

SEQ ID NO: 2120 - protein, 257 aa, Homo sapiens
MDFIQHLGVCCLVALISVGLLSVAACWFLPSIIAAAASWIITCVLLCCSKHARCFILLVFLSCGLREGRNALIAAGTGIVILGHVENIFHNFKGLLDGMTCNLRAKSFSIHFPLLKKYIEAIQWIYGLATPLSVFDDLVSWNQTLAVSLFSPSHVLEAQLNDSKGEVLSVLYQMATTTEVLSSLGQKLLAFAGLSLVLLGTGLFMKRFLGPCGWKYENIYITRQFVQFDERERHQQRPCVLPLNKEERRKFISGFQS

SEQ ID NO: 2121 - protein, 257 aa, Homo sapiens; identical to SEQ ID NO: 2120

SEQ ID NO: 2122 - protein, 352 aa, Homo sapiens
  SITE (284): Xaa equals any of the naturally occurring L-amino acids
MDFIQHLGVCCLVALISVGLLSVAACWFLPSIIAAAASWIITCVLLCCSKHARCFILLVFLSCGLREGRNALIAAGTGIVILGHVENIFHNFKGLLDGMTCNLRAKSFSIHFPLLKKYIEAIQWIYGLATPLSVFDDLVSWNQTLAVSLFSPSHVLEAQLNDSKGEVLSVLYQMATTTEVLSSLGQKLLAFAGLSLVLLGTGLFMKRFLGPCGWKYENIYITRQFVQFDERERHQQRPCVLPLNKEERRKYVIIPTFWPTPKERKNLGLFFLPILIHLCIWVLXAAVDYLLYRLIFSVSKQFQSLPGFEVHLKLHGEKQGTQDIIHDSSFNISVFEPNCIPKPWQALKLLAH

SEQ ID NO: 2123 - protein, 259 aa, Homo sapiens
MVSCSILALTHLLFEFKGLMGTSTVEQLLENVCLLLASRTRDVVKSALGFIKVAVTVMDVAHLAKHVQLVMEAIGKLSDDMRRHFRMKLRNLFTKFIRKFGFELVKRLLPEEYHRVLVNIRKAEARAKRHRALSQAAVEEEEEEEEEEEPAQGKGDSIEEILADSEDEEDNEEEERSRGKEQRKLARQRSRAWLKEGGGDEPLNFLDPKVAQRVLATQPGPAGQEEGPQLQGERRWPADHKGGGRRQQDGGRGRCQRRR

SEQ ID NO: 2124 - protein, 42 aa, Homo sapiens
MLWLGTSLIFSSFSASFDGVPFLSSWLFWSSGSSPNSLIPPF

SEQ ID NO: 2125 - protein, 45 aa, Homo sapiens [sequence omitted]

SEQ ID NO: 2126 - protein, 54 aa, Homo sapiens
MWPFLHLLNMPFTLTQVVASPSSCSNWKPQHPEMPPPQIHCTHVCLCMRVCARV

SEQ ID NO: 2127 - protein, 136 aa, Homo sapiens
MLMLLTLLVLGMVWVASAIVDKNKANRESLYDFWEYYLPYLYSCISFLGVLLLLGECTGSGREWAGSLDQSNQARRKGNGGHVREGVESRVWQVTGSCPYSVYSTGSRPHVLRHWEAASQAPAAGRPGGAAVLLSL

SEQ ID NO: 2128 - protein, 74 aa, Homo sapiens
MHWTFSSSLGCLYHFSLSFSGLHTVLKSSPSSRFLLPCSSQVTQPSPVGQPRLVVQLPPVKVIGHRTGQCRGPG

SEQ ID NO: 2129 - protein, 253 aa, Homo sapiens
MDNRFATAFVIACVLSLISTIYMAASIGTDFWYEYRSPVQENSSDLNKSIWDEFISDEADEKTYNDALFRYNGTVGLWRRCITIPKNMHWYSPPERTESFDVVTKCVSFTLTEQFMEKFVDPGNHNSGIDLLRTYLWRCQFLLPFVSLGLMCFGALIGLCACICRSLYPTIATGILHLLAGLCTLGSVSCYVAGIELLHQKLELPDNVSGEFGWSFCLACVSAPLQFMASALFIWAAHTNRKEYTLMKAYRVA

SEQ ID NO: 2130 - protein, 253 aa, Homo sapiens; identical to SEQ ID NO: 2129

SEQ ID NO: 2131 - protein, 57 aa, Homo sapiens [sequence omitted]

SEQ ID NO: 2132 - protein, 41 aa, Homo sapiens [sequence omitted]

SEQ ID NO: 2133 - protein, 51 aa, Homo sapiens
MSLEPSTSSFNILLFPAFLRVFGWALGWMPWEYLYLSSKVTNGETGTQRGT

SEQ ID NO: 2134 - protein, 60 aa, Homo sapiens
  SITE (10): Xaa equals any of the naturally occurring L-amino acids
  SITE (42): Xaa equals any of the naturally occurring L-amino acids
MFFPCLPTLXLRILHSGWVGLFLLISSRAPSSSLAWKHGPGXLWWPRRPLRSCTGLASCG

SEQ ID NO: 2135 - protein, 60 aa, Homo sapiens
  SITE (10): Xaa equals any of the naturally occurring L-amino acids
  SITE (48): Xaa equals any of the naturally occurring L-amino acids
MFFPCLPTLXLRILHSGWVGLFLLISSRAPSSSLAWKHGPGELWWPRXPLRSCTGLASCG

SEQ ID NO: 2136 - protein, 78 aa, Homo sapiens
MSPHQPMQVSSSKTILWLVLSCLCPSSPHPVISGLPQWYIGVLAGIVPVAPIRPGDSGLDLQREGPQPILSQGLNRRT

SEQ ID NO: 2137 - protein, 78 aa, Homo sapiens; identical to SEQ ID NO: 2136

SEQ ID NO: 2138 - protein, 144 aa, Homo sapiens
MSAVSAPALWQTWCVPAARAWTSSTLRHDAVARPNPSTSLTPGLLTSSDSPRWPGLQEAPGRPCIRLGRSELCMYIYTYIDTFIIYTHSLYIYIHCFLAPELIWVQAHFKTLPGGGCFFSGFLAREEGEGTGWVFSLKRESRRF

SEQ ID NO: 2139 - protein, 151 aa, Homo sapiens
MLHWVLSFFFLLSCPRTEGLPGLYCPGCSQCPGRGMWPGDPGPGIQGPGLDLRTGMEATGAQQPTLSSPHCLLSLPTLPARAVQLRWDLSISRAGGRVAVLGLCLEPGGSLLLPPSALPETDPCAACPPCPFVPMSGGGGRPTVPEAGHQP

SEQ ID NO: 2140 - protein, 173 aa, Homo sapiens [sequence omitted]

SEQ ID NO: 2141 - protein, 82 aa, Homo sapiens; identical to SEQ ID NO: 2027

SEQ ID NO: 2142 - protein, 53 aa, Homo sapiens
MGQRGVFLLILDAFSVPSTASCLITPLPPPHPQPSQFFLASALQPYLGKEEWV

SEQ ID NO: 2143 - protein, 53 aa, Homo sapiens; identical to SEQ ID NO: 2142

SEQ ID NO: 2144 - protein, 53 aa, Homo sapiens; identical to SEQ ID NO: 2142

SEQ ID NO: 2145 - protein, 97 aa, Homo sapiens
MLWKLKLSRCWLDLTLLIFSQISHMDQIIFFFVVYPILNNIFSLNYCRDFFCGGYFLFCSKIIRCKAILCLTVALSKQLCSGVAFDVLEFDYMQSCI

SEQ ID NO: 2146 - protein, 122 aa, Homo sapiens
  SITE (63): Xaa equals any of the naturally occurring L-amino acids
  SITE (99): Xaa equals any of the naturally occurring L-amino acids
  SITE (122): Xaa equals any of the naturally occurring L-amino acids
MMTMTSDRWFSMAWASCSLSRPPLTPSCSCQQPATVALLLQTISVCSAQQADPLSPPRACRPXRQFPVLQSAGPPHSPHVYAFVLFPVSSRWQGGDFCXICCCFPQCLGRCLEHTRCSINPX

SEQ ID NO: 2147 - protein, 99 aa, Homo sapiens
MEGPRGWLVLCVLAISLASMVTEDLCRAPDGKKGEAGRPGRRGRPGLKGEQGEPGAPGIRTGIQGLKGDQGEPGPSGNPGKVGYPGPSGPLRSPWHPGN

SEQ ID NO: 2148 - protein, 245 aa, Homo sapiens
MEGPRGWLVLCVLAISLASMVTEDLCRAPDGKKGEAGRPGRRGRPGLKGEQGEPGAPGIRTGIQGLKGDQGEPGPSGNPGKVGYPGPSGPLGARGIPGIKGTKGSPGNIKDQPRPAFSAIRRNPPMGGNVVIFDTVITNQEEPYQNHSGRFVCTVPGYYYFTFQVLSQWEICLSIVSSSRGQVRRSLGFCDTTNKGLFQVVSGGMVLQLQQGDQVWVEKDPKKGHIYQGSEADSVFSGFLIFPSA

SEQ ID NO: 2149 - protein, 57 aa, Homo sapiens
MGHLHWGVSGNFFFPRLSLFLLFAWLQITQANEPRLPGKYSIKAIKITICITFRTSA

SEQ ID NO: 2150 - protein, 152 aa, Homo sapiens
MGVHVGAALGALWFCLTGALEVQVPEDPVVALVGTDATLCCSFSPEPGFSLAQLNLIWQLTDTKQLVHSFAEGQDQGSAYANRTALFLDLLAQGNASLRLQSVRVADEGQLHLLREHPGFRQRCRQPAGGRSLLEAQHDPGAQQGPAARGTW

SEQ ID NO: 2151 - protein, 302 aa, Homo sapiens
  SITE (128): Xaa equals any of the naturally occurring L-amino acids
MRLGSPGLLFLLFSSLRADTQEKEVRAMVGSDVELSCACPEGSRFDLNDVYVYWQTSESKTVVTYHIPQNSSLENVDSRYRNRALMSPAGMLRGDFSLRLFNVTPQDEQKFHCLVLSQSLGFQEVLSXEVTLHVAANFSVPVVSAPHSPSQDELTFTCTSINGYPRPNVYWINKTDNSLLDQALQNDTVFLNMRGLYDVVSVLRIARTPSVNIGCCIENVLLQQNLTVGSQTGNDIGERDKITENPVSTGEKNAATWSILAVLCLLVVVAVAIGWVCRDRCLQHSYAGAWAVSPETELTGHV

SEQ ID NO: 2152 - protein, 316 aa, Homo sapiens
MLRRRGSPGMGVHVGAALGALWFCLTGALEVQVPEDPVVALVGTDATLCCSFSPEPGFSLAQLNLIWQLTDTKQLVHSFAEGQDQGSAYANRTALFPDLLAQGNASLRLQRVRVADEGSFTCFVSIRDFGSAAVSLQVAAPYSKPSMTLEPNKDLRPGDTVTITCSSYQGYPEAEVFWQDGQGVPLTGNVTTSQMANEQGLFDVHSILRVVLGANGTYSCLVRNPVLQQDAHSSVTITGQPMTFPPEALWVTVGLSVCLIALLVALAFVCWRKIKQSCEEENAGAEDQDGEGEGSKTALQPLKHSDSKEDDGQEIA

SEQ ID NO: 2153 - protein, 831 aa, Homo sapiens
MKVHMHTKFCLICLLTFIFHHCNHCHEEHDHGPEALHRQHRGMTELEPSKFSKQAAENEKKYYIEKLFERYGENGRLSFFGLEKLLTNLGLGERKVVEINHEDLGHDHVSHLDILAVQEGKHFHSHNHQHSHNHLNSENQTVTSVSTKRNHKCDPEKETVEVSVKSDDKHMHDHNHRLRHHHRLHHHLDHNNTHHFHNDSITPSERGEPSNEPSTETNKTQEQSDVKLPKGKRKKKGRKSNENSEVITPGFPPNHDQGEQYEHNRVHKPDRVHNPGHSHVHLPERNGHDPGRGHQDLDPDNEGELRHTRKREAPHVKNNAIISLRKDLNEDDHHHECLNVTQLLKYYGHGANSPISTDLFTYLCPALLYQIDSRLCIEHFDKLLVEDINKDKNLVPEDEANIGASAWICGIISITVISLLSLLGVILVPIINQGCFKFLLTFLVALAVGTMSGDALLHLLPHSQGGHDHSHQHAHGHGHSHGHESNKFLEEYDAVLKGLVALGGIYLLFIIEHCIRMFKHYKQQRGKQKWFMKQNTEESTIGRKLSDHKLNNTPDSDWLQLKPLAGTDDSVVSEDRLNETELTDLEGQQESPPKNYLCIEEEKIIDHSHSDGLHTIHEHDLHAAAHNHHGENKTVLRKHNHQWHHKHSHHSHGPCHSGSDLKETGIANIAWMVIMGDGIHNFSDGLAIGAAFSAGLTGGISTSIAVFCHELPHELGDFAVLLKAGMTVKQAIVYNLLSAMMAYIGMLIGTAVGQYANNITLWIFAVTAGMFLYVALVDMLPEMLHGDGDNEEHGFCPVGQFILQNLGLLFGFAIMLVIALYEDKIVFDIQF

SEQ ID NO: 2154 - protein, 480 aa, Homo sapiens
MLFRNRFLLLLALAALLAFVSLSLQFFHLIPVSTPKNGMSSKSRKRIMPDPVTEPPVTDPVYEALLYCNIPSVAERSMEGHAPHHFKLVSVHVFIRHGDRYPLYVIPKTKRPEIDCTLVANRKPYHPKLEAFISHMSKGSGASFESPLNSLPLYPNHPLCEMGELTQTGVVQHLQNGQLLRDIYLKKHKLLPNDWSADQLYLETTGKSRTLQSGLALLYGFLPDFDWKKIYFRHQPSALFCSGSCYCPVRNQYLEKEQRRQYLLRLKNSQLEKTYGEMAKIVDVPTKQLRAANPIDSMLCHFCHNVSFPCTRNGCVDMEHFKVIKTHQIEDERERREKKLYFGYSLLGAHPILNQTIGRMQRATEGRKEELFALYSAHDVTLSPVLSALGLSEARFPRFAARLIFELWQDREKPSEHSVRILYNGVDVTFHTSFCQDHHKRSPKPMCPLENLVRFVKRDMFVALGGSGTNYYDACHREGF

SEQ ID NO: 2155 - protein, 151 aa, Homo sapiens
MFLMLGCALPIYNKYWPLFVLFFYILSPIPYCIARRLVDDTDAMSNACKELAIFLTTGIVVSAFGLPIVFARAHLMGRLPFFSKMGTAESEGRETLTQQLPLPAAAMRRLLPASRVSTQPVLRLADSAESLLGRPALWALGFLLCPPSQAQ

SEQ ID NO: 2156 - protein, 89 aa, Homo sapiens
MYMQDYWRTWLKGLRGFFFVGVLFSAVSIAAFCTFLVLAITRHQSLTDPTSYYLSSVWSFISFKWAFLLSLYAHRYRADFADISILSDF

SEQ ID NO: 2157 - protein, 56 aa, Homo sapiens
MRGHITTLLTTSFLVFGLHIIFFLNISCFNFRVFILFETRPEDSRLYRERPVLPRY

SEQ ID NO: 2158 - protein, 50 aa, Homo sapiens
MQVKNSIHVTFVARILVRVLICLSTSEAILARNHIYVVSVTNASVEVQTS

SEQ ID NO: 2159 - protein, 50 aa, Homo sapiens; identical to SEQ ID NO: 2158

SEQ ID NO: 2160 - protein, 81 aa, Homo sapiens
MRLLVLSSLLCILLLCFSIFSTEGKRRPAKAWSGRRTRLCCHRVPSPNSTNLKGHHVRLCKPCKLEPEPRLWVVPGALPQV

SEQ ID NO: 2161 - protein, 73 aa, Homo sapiens
MNITRKLWSRTFNCSVPCSDTVPVIAVSVFILFLPVVFYLSSFLHSEQKKRKLILPKRLKSSTSFANIQENSN

SEQ ID NO: 2162 - protein, 193 aa, Homo sapiens
MEPGPTAAQRRCSLPPWLPLGLLLWSGLALGALPFGSSPHRVFHDLLSEQQLLEVEDLSLSLLQGGGLGPLSLPPDLPDLDPECRELLLDFANSSAELTGCLVRSARPVRLCQTCYPLFQQVVSKMDNISRAAGNTSESQSCARSLLMADRMQIVVILSEFFNTTWQEANCANCLTNNSEELSNSTVYFLKSI

SEQ ID NO: 2163 - protein, 134 aa, Homo sapiens
MAPEVMEQVRGYDFKADIWSFGITAIELATGAAPYHKYPPMKVLMLTLQNDPPSLETGVQDKEMLKKYGKSFRKMISLCLQKDPEKRPTAAELLRHKFFQKAKNKEFLQEKTLQRAPTISERAKKVRRVPGSCP

SEQ ID NO: 2164 - protein, 334 aa, Homo sapiens
  SITE (105): Xaa equals any of the naturally occurring L-amino acids
MEPGPTAAQRRCSLPPWLPLGLLLWSGLALGALPFGSSPHRVFHDLLSEQQLLEVEDLSLSLLQGGGLGPLSLPPDLPDLDPECRELLLDFANSSAELTGCLVRXARPVRLCQTCYPLFQQVVSKMDNISRAAGNTSESQSCARSLLMADRMQIVVILSEFFNTTWQEANCANCLTNNSEELSNSTVYFLNLFNHTLTCFEHNLQGNAHSLLQTKNYSEVCKNCREAYKTLSSLYSEMQKMNELENKAEPGTHLCIDVEDAMNITRKLWSRTFNCSVPCSDTVPVIAVSVFILFLPVVFYLSSFLHSEQKKRKLILPKRLKSSTSFANIQENSN

SEQ ID NO: 2165 - protein, 49 aa, Homo sapiens
MVLVFAYLCVLLIVCWVTSKTSLALKYTVYKNFKRLIWNKSILIITLTP

SEQ ID NO: 2166 - protein, 75 aa, Homo sapiens
MSLSILVALSLQILFLFTILKCMLAKWVDFQIKCSFHKSFVMVFWSEMHFHFSFLFLLSILSFFPNKIYPGDYIC

SEQ ID NO: 2167 - protein, 86 aa, Homo sapiens [sequence omitted]

SEQ ID NO: 2168 - protein, 152 aa, Homo sapiens [sequence omitted]

SEQ ID NO: 2169 - protein, 142 aa, Homo sapiens [sequence omitted]

SEQ ID NO: 2170 - protein, 453 aa, Homo sapiens
MKLLVILIFSGLITCCGGNSSHSLPSKLLLVSFDGFRADYLQNYEFPHLQNFIKEGVLVEHVKNVFITKTFPNHYSIVTGLYEESHGIVANSMYDVITKKHFSDFDDKDPFWWNEAVPIWVTNQLQENRSSAAAMWPGTDVPIHNTTPSYFMNYSSSVSFEERLNNITMWLMNSNPPVTFATLYWEEPDASGHKYGPEDKENMYRVLKEVDDLIGELVHKLKVLGLWENLNVIITSDHGMTQCSKDKLINLDLCIDRSSYTLVDLTPVAAVLPKINTTEVYNKLKVCNPHMNVYLKEDIPARFHYQHNDRIQPIILVADEGWTIVLNKSLPKLGDHGYDNSLSSMHPFLAAHGPAFHKGYKHSTINSVDIYPMMCHILGLKPHPNNGTFGHTKCLLVDQWCINLPEAIGIVIGALLVLTTLTCLIIIMQNRLSVPRPFSRLQLQEDDDDPLIE

SEQ ID NO: 2171 - protein, 287 aa, Homo sapiens
MGALRPTLLPPSLPLLLLLMLGMGCWAREVLVPEGPLYRVAGTAVSISCNVTGYEGPAQQNFEWFLYRPEAPDTALGIVSTKDTQFSYAVFKSRVVAGEVQVQRLQGDAVVLKIARLQAQDAGIYECHTPSTDTRYLGSYSGKVELRVLPDVLQVSAAPPGPRGRQAPTSPPRMTVHEGQELALGCLARTSTQKHTHLAVSFGRSVPEAPVGRSTLQEVVGIRSDLAVEAGAPYAERLAAGELRLGKEGTDRYRMVVGGAQAGDAGTYHCTAAEWIQDPDGSWAQIA

SEQ ID NO: 2172 - protein, 613 aa, Homo sapiens
MGALRPTLLPPSLPLLLLLMLGMGCWAREVLVPEGPLYRVAGTAVSISCNVTGYEGPAQQNFEWFLYRPEAPDTALGIVSTKDTQFSYAVFKSRVVAGEVQVQRLQGDAVVLKIARLQAQDAGIYECHTPSTDTRYLGSYSGKVELRVLPDVLQVSAAPPGPRGRQAPTSPPRMTVHEGQELALGCLARTSTQKHTHLAVSFGRSVPEAPVGRSTLQEVVGIRSDLAVEAGAPYAERLAAGELRLGKEGTDRYRMVVGGAQAGDAGTYHCTAAEWIQDPDGSWAQIAEKRAVLAHVDVQTLSSQLAVTVGPGERRIGPGEPLELLCNVSGALPPAGRHAAYSVGWEMAPAGAPGPGRLVAQLDTEGVGSLGPGYEGRHIAMEKVASRTYRLRLEAARPGDAGTYRCLAKAYVRGSGTRLREAASARSRPLPVHVREEGVVLEAVAWLAGGTVYRGETASLLCNISVRGGPPGLRLAASWWVERPEDGELSSVPAQLVGGVGQDGVAELGVRPGGGPVSVELVGPRSHRLRLHSLGPEDEGVYHCAPSAWVQHADYSWYQAGSARSGPVTVYPYMHALDTLFVPLLVGTGVALVTGATVLGTITCCFMKRLRKR

SEQ ID NO: 2173 - protein, 122 aa, Homo sapiens
MWGWGSLVSARGGWGVFIYLYMGLYIVLWGMGEPAGGENPPLSPHPPGRANVKLLIFVLYIFYINISIFFLQNQFINGRGVWGGHMELPLWGGPLHYPTYRPFPHPPPHSPPPGCDCCKMGV

SEQ ID NO: 2174 - protein, 613 aa, Homo sapiens
  SITE (507): Xaa equals any of the naturally occurring L-amino acids
MGALRPTLLPPSLPLLLLLMLGMGCWAREVLVPEGPLYRVAGTAVSISCNVTGYEGPAQQNFEWFLYRPEAPDTALGIVSTKDTQFSYAVFKSRVVAGEVQVQRLQGDAVVLKIARLQAQDAGIYECHTPSTDTRYLGSYSGKVELRVLPDVLQVSAAPPGPRGRQAPTSPPRMTVHEGQELALGCLARTSTQKHTHLAVSFGRSVPEAPVGRSTLQEVVGIRSDLAVEAGAPYAERLAAGELRLGKEGTDRYRMVVGGAQAGDAGTYHCTAAEWIQDPDGSWAQIAEKRAVLAHVDVQTLSSQLAVTVGPGERRIGPGEPLELLCNVSGALPPAGRHAAYSVGWEMAPAGAPGPGRLVAQLDTEGVGSLGPGYEGRHIAMEKVASRTYRLRLEAARPGDAGTYRCLAKAYVRGSGTRLREAASARSRPLPVHVREEGVVLEAVAWLAGGTVYRGETASLLCNISVRGGPPGLRLAASWWVERPEDGELSSVPAQLVGGVGQDGVAXLGVRPGGGPVSVELVGPRSHRLRLHSLGPEDEGVYHCAPSAWVQHADYSWYQAGSARSGPVTVYPYMHALDTLFVPLLVGTGVALVTGATVLGTITCCFMKRLRKR

SEQ ID NO: 2175 - protein, 60 aa, Homo sapiens
MAWAVTLILSLSRAVRTQEVPMALQAHSGIQLASRVGLPGPWPECSTLSSRCHLSMDSKV

SEQ ID NO: 2176 - protein, 396 aa, Homo sapiens
MWWLLLWGVLQACPTRGSVLLAQELPQQLTSPGYPEPYGKGQESSTDIKAPEGFAVRLVFQDFDLEPSQDCAGDSVTISFVGSDPSQFCGQQGSPLGRPPGQREFVSSGRSLRLTFRTQPSSENKTAHLHKGFLALYQTVAVNYSQPISEASRGSEAINAPGDNPAKVQNHCQEPYYQAAAAGALTCATPGTWKDRQDGEEVLQCMPVCGRPVTPIAQNQTTLGSSRAKLGNFPWQAFTSIHGRGGGALLGDRWILTAAHTIYPKDSVSLRKNQSVNVFLGHTAIDEMLKLGNHPVHRVVVHPDYRQNESHNFSGDIALLELQHSIPLGPNVLPVCLPDNETLYRSGLLGYVSGFGMEMGWLTTELKYSRLPVAPREACNAWLQKRQRPEKKKKKK

SEQ ID NO: 2177 - protein, 172 aa, Homo sapiens
GTRTERDELLKDLQQSIAREPSAPSIPTPAYQSLPAGGHAPTPPTPAPRTMPPTKPQPPARPPPPVLPANRAPSATAPSPVGAGTAAPAPSQTPGSAPPPQAQGPPYPTYPGYPGYCQMPMPMGYNPYAYGQYNMPYPPVYHQSPGQAPYPGPQQPSYPFPQPPQQSYYPQQ

SEQ ID NO: 2178 - protein, 142 aa, Homo sapiens
  SITE (111): Xaa equals any of the naturally occurring L-amino acids
MHQLLQLQRQEPCRLLSPSPQPGLHHLCFQQIELLLLLLHLQWGLGLLRQLHHKRLAQLLLHRRRDHPIPPIQDILGIAKCPCPWAIILMRMASIICHIHQCITRVLDRLXTRDPSSLHTPSLSPHSSLTIHSSNMSAQQLS

SEQ ID NO: 2179 - protein, 868 aa, Homo sapiens
  SITE (194): Xaa equals any of the naturally occurring L-amino acids
  SITE (309): Xaa equals any of the naturally occurring L-amino acids
  SITE (550): Xaa equals any of the naturally occurring L-amino acids
MATFISVQLKKTSEVDLAKPLVKFIQQTYPSGGEEQAQYCRAAEELSKLRRAAVGRPLDKHEGALETLLRYYDQICSIEPKFPFSENQICLTFTWKDAFDKGSLFGGSVKLALASLGYEKSCVLFNCAALASQIAAEQNLDNDEGLKIAAKHYQFASGAFLHIKETVLSALSREPTVDISPDTVGTLSLIMLAXAQEVFFLKATRDKMKDAIIAKLANQAADYFGDAFKQCQYKDTLPKEVFPVLAAKHCIMQANAEYHQSILAKQQKKFGEEIARLQHAAELIKTVASRYDEYVNVKDFSDKINRALXAAKKDNDFIYHDRVPDLKDLDPIGKATLVKSTPVNVPISQKFTDLFEKMVPVSVQQSLAAYNQRKADLVNRSIAQMREATTLANGVLASLNLPAAIEDVSGDTVPQSILTKSRSVIEQGGIQTVDQLIKELPELLQRNREILDESLRLLDEEEATDNDLRAKFKERWQRTPSNELYKPLRAEGTNFRTVLDKAVQADGQVKECYQSHRDTIVLLCKPEPELNAAIPSANPAKTMQGSEVVXVLKSLLSNLDEVKKEREGLENDLKSVNFDMTSKFLTALAQDGVINEEALSVTELDRVYGGLTTKVQESLKKQEGLLKNIQVSHQEFSKMKQSNNEANLREEVLKNLATAYDNFVELVANLKEGTKFYNELTEILVRFQNKCSDIVFARKTERDELLKDLQQSIAREPSAPSIPTPAYQSLPAGGHAPTPPTPAPRTMPPTKPQPPARPPPPVLPANRAPSATAPSPVGAGTAAPAPSQTPGSAPPPQAQGPPYPTYPGYPGYCQMPMPMGYNPYAYGQYNMPYPPVYHQSPGQAPYPGPQQPSYPFPQPPQQSYYPQQ

SEQ ID NO: 2180 - protein, 102 aa, Homo sapiens
MKPATASALLLLLLGLAWTQGSHGWGADASSLQKRAGRADQPGAGWQEVAAVTSKNYNYNQHAYPTAYGGKYSVKTPAKGGVSPSSSASRVQPGLLQWVKFW

SEQ ID NO: 2181 - protein, 140 aa, Homo sapiens
  SITE (36): Xaa equals any of the naturally occurring L-amino acids
MFLFGGFLMTLFGLFVSLVFLGQAFTIMLVYVWSRXNPYVRMNFFGLLNFQAPFLPWVLMGFSLLLGNSIIVDLLGIAVGHIYFFLEDVFPNQPGGIRILKTPSILKAIFDTPDEDPNYNPLPEERPGGFAWGEGQRLGG

SEQ ID NO: 2182 - protein, 156 aa, Homo sapiens
MLEEGSFRGRTADFVFMFLFGGFLMTLFGLFVSLVFLGQAFTIMLVYVWSRRNPYVRMNFFGLLNFQAPFLPWVLMGFSLLLGNSIIVDLLGIAVGHIYFFLEDVFPNQPGGIRILKTPSILKAIFDTPDEDPNYNPLPEERPGGFAWGEGQRLGG

SEQ ID NO: 2183 - protein, 239 aa, Homo sapiens
MAYQSLRLEYLQIPPVSRAYTTACVLTTAAVQLELITPFQLYFNPELIFKHFQIWRLITNFLFFGPVGFNFLFNMIFLYRYCRMLEEGSFRGRTADFVFMFLFGGFLMTLFGLFVSLVFLGQAFTIMLVYVWSRRNPYVRMNFFGLLNFQAPFLPWVLMGFSLLLGNSIIVDLLGIAVGHIYFFLEDVFPNQPGGIRILKTPSILKAIFDTPDEDPNYNPLPEERPGGFAWGEGQRLGG

SEQ ID NO: 2184 - protein, 132 aa, Homo sapiens
MTLFGLFVSLVFLGQAFTIMLVYVWSRRNPYVRMNFFGLLNFQAPFLPWVLMGFSLLLGNSIIVDLLGIAVGHIYFFLEDVFPNQPGGIRILKTPSILKAIFDTPDEDPNYNPLPEERPGGFAWGEGQRLGG

SEQ ID NO: 2185 - protein, 339 aa, Homo sapiens
MSWSTFLLAEACGFTGVVAVLFCGITQAHYTYNNLSVESRSRTKQLFEVLHFLAENFIFSYMGLALFTFQKHVFSPIFIIGAFVAIFLGRAAHIYPLSFFLNLGRRHKIGWNFQHMMMFSGLRGAMAFALAIRDTASYARQMMFTTTLLIVFFTVWIIGGGTTPMLSWLNIRVGVDPDQDPPPNNDSFQVLQGDGPDSARGNRTKQESAWIFRLWYSFDHNYLKPILTHSGPPLTTTLPAWCGLLARCLTSPQVYDNQEPLREEDSDFILTEGDLTLTYGDSTVTANGSSSSHTASTSLEGSRRTKSSSEEVLERDLGMGDQKVSSRGTRLVFPLEDNA

SEQ ID NO: 2186 - protein, 339 aa, Homo sapiens; identical to SEQ ID NO: 2185

SEQ ID NO: 2187 - protein, 509 aa, Homo sapiens
  SITE (20): Xaa equals any of the naturally occurring L-amino acids
  SITE (168): Xaa equals any of the naturally occurring L-amino acids
  SITE (198): Xaa equals any of the naturally occurring L-amino acids
  SITE (199): Xaa equals any of the naturally occurring L-amino acids
  SITE (244): Xaa equals any of the naturally occurring L-amino acids
  SITE (246): Xaa equals any of the naturally occurring L-amino acids
  SITE (294): Xaa equals any of the naturally occurring L-amino acids
  SITE (301): Xaa equals any of the naturally occurring L-amino acids
  SITE (303): Xaa equals any of the naturally occurring L-amino acids
  SITE (493): Xaa equals any of the naturally occurring L-amino acids
  SITE (498): Xaa equals any of the naturally occurring L-amino acids
  SITE (499): Xaa equals any of the naturally occurring L-amino acids
  SITE (505): Xaa equals any of the naturally occurring L-amino acids
MEELATEKEAEESHRQDSVXLLTFILLLTLTILTIWLFKHRRVRFLHETGLAMIYGLIVGVILRYGTPATSGRDKSLSCTQEDRAFSTLLVNVSGKFFEYTLKGEISPGKINSVEQNDMLRKVTFDPEVFFNILLPPIIFHAGYSLKKRHFFRNLGSILAYAFLGTAXSCFIIGNLMYGVVKLMKIMGQLSDKFYYTXXLFFGAIISATDPVTVLAIFNELHADVDLYALLFGESVLNDAVAIXLXSSIVAYQPAGLNTHAFDAAAFFKSVGIFLGIFSGSFTMGAVTGVVTAXVTKFTKXHXFPLLETALFFLMSWSTFLLAEACGFTGVVAVLFCGITQAHYTYNNLSVESRSRTKQLFEVLHFLAENFIFSYMGLALFTFQKHVFSPIFIIGAFVAIFLGRAAHIYPLSFFLNLGRRHKIGWNFQHMMMFSGLRGAMAFALAIRDTASYARQMMFTTTLLIVFFTVWIIGGGTTPMLSWLNIRVGVDPDXDPPPXXDSFAFXTETA

SEQ ID NO: 2188 - protein, 146 aa, Homo sapiens
MTMRSLLRTPFLCGLLWAFCAPGARAEEPAASFSQPGSMGLDKNTVHDQEHIMEHLEGVINKPEAEMSPQELQLHYFKMHDYDGNNLLDGLELSTAITHVHKEEGSEQAPLMSEDELINIIDGVLRDDDKNNDGYIDYAEFAKSLQ

SEQ ID NO: 2189 - protein, 530 aa, Homo sapiens
  SITE (488): Xaa equals any of the naturally occurring L-amino acids
  SITE (490): Xaa equals any of the naturally occurring L-amino acids
  SITE (494): Xaa equals any of the naturally occurring L-amino acids
  SITE (495): Xaa equals any of the naturally occurring L-amino acids
  SITE (505): Xaa equals any of the naturally occurring L-amino acids
MEFGLTWVFLVALLRGVHCQVQLVESGGAVVQPGGSLRLSCAASGFTFSRYGMHWVRQAPGKGLQWLALVLHDGGQKYNEDVVKGRFTISRDNSNNKVYLQMDSLRGEDTATYYCVRGMWEQLPSYYFDYWGQGTLVTVSSASPTSPKVFPLSLCSTQPDGNVVIACLVQGFFPQEPLSVTWSESGQGVTARNFPPSQDASGDLYTTSSQLTLPATQCLAGKSVTCHVKHYTNPSQDVTVPCPVPSTPPTPSPSTPPTPSPSCCHPRLSLHRPALEDLLLGSEANLTCTLTGLRDASGVTFTWTPSSGKSAVQGPPDRDLCGCYSVSSVLPGCAEPWNHGKTFTCTAAYPESKTPLTATLSKSGNTFRPEVHLLPPPSEELALNELVTLTCLARGFSPKDVLVRWLQGSQELPREKYLTWASRQEPSQGTTTFAVTSILRVAAEDWKKGDTFSCMVGHEALPLAFTQKTIDRLAGKPTHVNVSVVMAXVXGPCXXAARLSPPLNXLHAPPKKKKKKKKKKKKKKKKKKKK

SEQ ID NO: 2190 - protein, 265 aa, Homo sapiens
MGGQVAGVYAAYYPSDVSSLCLVCPAGLQYSTDNQFVQRLKELQGSAAVEKIPLIPSTPEEMSEMLQLCSYVRFKVPQQILQGLVDVRIPHNNFYRKLFLEIVSEKSRYSLHQNMDKIKVPTQIIWGKQDAGAGCVWGRHVGQVNCQLPGGASGKLWALSSDGKTQEDSQAHNRLFSFCAQHRQQQEAGLRPRLQPAFCTQHLLPSPKSDAATTLRDPAPNAVGAPVTLRKPVPYPWYPRFPRALGTTRKPPRYFSQNRNSYGTK

SEQ ID NO: 2191 - protein, 99 aa, Homo sapiens
MAVWGDTELAAGVFCFFLFFCFLYLSGTWNASKTELFTPLERELKPGHPSGMLSGSHPHGAQQAKSTGLKLSLPAQQSEVDLGCSSLVWGGASAITEAL

SEQ ID NO: 2192 - protein, 144 aa, Homo sapiens
MPTTTEQPVTTTFPVTTGLKPTVALCQQKCRRTGTLEGNYCSSDFVLAGTVITTITRDGSLHATVSIINIYKEGNLAIQQAGKNMSARLTVVCKQCPLLRRGLNYIIMGQVGEDGRGKIMPNSFIMMFKTKNQKLLDALKNKQC

SEQ ID NO: 2193 - protein, 294 aa, Homo sapiens
  SITE (93): Xaa equals any of the naturally occurring L-amino acids
  SITE (97): Xaa equals any of the naturally occurring L-amino acids
MMVQMISDANTAGNGFMAMFSAAEPNERGDQYCGGLLDRPSGSFKTPNWPDRDYPAGVTCVWHIVAPKNQLIELKFEKFDVERDNYCRYDYVXVFNXGEVNDARRIGKYCGDSPPAPIVSERNELLIQFLSDLSLTADGFIGHYIFRPKKLPTTTEQPVTTTFPVTTGLKPTVALCQQKCRRTGTLEGNYCSSDFVLAGTVITTITRDGSLHATVSIINIYKEGNLAIQQAGKNMSARLTVVCKQCPLLRRGLNYIIMGQVGEDGRGKIMPNSFIMMFKTKNQKLLDALKNKQC

SEQ ID NO: 2194 - protein, 487 aa, Homo sapiens
MKHLWFFLLLVAAPRWVLSQVQLQESGPGLVKPSETLSLTCTVSGGSISSGGHYWSWIRQHPGKGLEWIGYISYNGVTYYNPSLKSRVTISVDTSQNQFSLRLSSVTAADTAVYYCAKDHRATRDGYQLEYRGFDYWGQGILVTVSSASPTSPKVFPLSLDSTPQDGNVVVACLVQGFFPQEPLSVTWSESGQNVTARNFPPSQDASGDLYTTSSQLTLPATQCPDGKSVTCHVKHYTNPSQDVTVPCPVPPPPPCCHPRLSLHRPALEDLLLGSEANLTCTLTGLRDASGATFTWTPSSGKSAVQGPPERDLCGCYSVSSVLPGCAQPWNHGETFTCTAAHPELKTPLTANITKSGNTFRPEVHLLPPPSEELALNELVTLTCLARGFSPKDVLVRWLQGSQELPREKYLTWASRQEPSQGTTTFAVTSILRVAAEDWKKGDTFSCMVGHEALPLAFTQKTIDRLAGKPTHVNVSVVMAEVDGTCY

SEQ ID NO: 2195 - protein, 189 aa, Homo sapiens [sequence omitted]

SEQ ID NO: 2196 - protein, 298 aa, Homo sapiens
MKTLQSTLLLLLLVPLIKPAPPTQQDSRIIYDYGTDNFEESIFSQDYEDKYLDGKNIKEKETVIIPNEKSLQLQKDEAITPLPPKKENDEMPTCLLCVCLSGSVYCEEVDIDAVPPLPKESAYLYARFNKIKKLTAKDFADIPNLRRLDFTGNLIEDIEDGTFSKLSLLEELSLAENQLLKLPVLPPKLTLFNAKYNKIKSRGIKANAFKKLNNLTFLYLDHNALESVPLNLPESLRVIHLQFNNIASITDDTFCKANDTSYIRDRIEEIRLEGNPIVLGKHPNSFICLKRLPIGSYF

SEQ ID NO: 2197 - protein, 298 aa, Homo sapiens; identical to SEQ ID NO: 2196

SEQ ID NO: 2198 - protein, 42 aa, Homo sapiens
MECKKRIQLIMLASIVRLPPTEQSGLLKTRFHNFCQRNLQSS

SEQ ID NO: 2199 - protein, 472 aa, Homo sapiens
MIRTRRGWSSMWPWIGVGYLAGCLVHALGEKQPELQISERDVLCVQIAGLCHDLGHGPFSHMFDGRFIPLARPEVKWTHEQGSVMMFEHLINSNGIKPVMEQYGLIPEEDICFIKEQIVGPLESPVEDSLWPYKGRPENKSFLYEIVSNKRNGIDVDKWDYFARDCHHLGIQNNFDYKRFIKFARVCEVDNELRICARDKEVGNLYDMFHTRNSLHRRAYQHKVGNIIDTMITDAFLEADDYIEITGAGGKKYRISTAIDDMEAYTKLTDNIFLEILYSTDPKLKDAREILKQIEYRNLFKYVGETQPTGQIKIKREDYESLPKEVASAKPKVLLDVKLKAEDFIVDVINMDYGMQEKNPIDHVSFYCKTAPNRAIRITKNQVSQLLPEKFAEQLIRVYCKKVDRKSLYAARQYFVQWCADRNFTKPQDGDVIAPLITPQKKEWNDSTSVQNPTRLREASKSRVQLFKDDPM

SEQ ID NO: 2200 - protein, 626 aa, Homo sapiens
  SITE (353): Xaa equals any of the naturally occurring L-amino acids
  SITE (354): Xaa equals any of the naturally occurring L-amino acids
  SITE (363): Xaa equals any of the naturally occurring L-amino acids
MQRADSEQPSKRPRCDDSPRTPSNTPSAEADWSPGLELHPDYKTWGPEQVCSFLRRGGFEEPVLLKNIRENEITGALLPCLDESRFENLGVSSLGERKKLLSYIQRLVQIHVDTMKVINDPIHGHIELHPLLVRIIDTPQFQRLRYIKQLGGGYYVFPGASHNRFEHSLGVGYLAGCLVHALGEKQPELQISERDVLCVQIAGLCHDLGHGPFSHMFDGRFIPLARPEVKWTHEQGSVMMFEHLINSNGIKPVMEQYGLIPEEDICFIKEQIVGPLESPVEDSLWPYKGRPENKSFLYEIVSNKRNGIDVDKWDYFARDCHHLGIQNNFDYKRFIKFARVCEVDNELRICARXXEVGNLYDMXHTRNSLHRRAYQHKVGNIIDTMITDAFLKADDYIEITGAGGKKYRISTAIDDMEAYTKLTDNIFLEILYSTDPKLKDAREILKQIEYRNLFKYVGETQPTGQIKIKREDYESLPKEVASAKPKVLLDVKLKAEDFIVDVINMDYGMQEKNPIDHVSFYCKTAPNRAIRITKNQVSQLLPEKFAEQLIRVYCKKVDRKSLYAARQYFVQWCADRNFTKPQDGDVIAPLITPQKKEWNDSTSVQNPTRLREASKSRVQLFKDDPM

SEQ ID NO: 2201 - protein, 245 aa, Homo sapiens
  SITE (128): Xaa equals any of the naturally occurring L-amino acids
MEGPRGWLVLCVLAISLASMVTEDLCRAPDGKKGEAGRPGRRGRPGLKGEQGEPGAPGIRTGIQGLKGDQGEPGPSGNPGKVGYPGPSGPLGARGIPGIKGTKGSPGNIKDQPRPAFSAIRRNPPMGXNVVIFDTVITNQEEPYQNHSGRFVCTVPGYYYFTFQVLSQWEICLSIVSSSRGQVRRSLGFCDTTNKGLFQVVSGGMVLQLQQGDQVWVEKDPKKGHIYQGSEADSVFSGFLIFPSA

SEQ ID NO: 2202 - protein, 32 aa, Homo sapiens
MGVNKVLFTFFFFSSLLDGVGTSHSLASFPHT

SEQ ID NO: 2203 - protein, 245 aa, Homo sapiens; identical to SEQ ID NO: 2148

SEQ ID NO: 2204 - protein, 245 aa, Homo sapiens; identical to SEQ ID NO: 2148

SEQ ID NO: 2205 - protein, 245 aa, Homo sapiens; identical to SEQ ID NO: 2148

SEQ ID NO: 2206 - protein, 245 aa, Homo sapiens; identical to SEQ ID NO: 2148

SEQ ID NO: 2207 - protein, 229 aa, Homo sapiens
  SITE (47): Xaa equals any of the naturally occurring L-amino acids
  SITE (49): Xaa equals any of the naturally occurring L-amino acids
MEGPRGWLVLCVLAISLASMVTEDLCRAPDGKKGEAGRPGRRGRPGXKXLKGDQGEPGPSGNPGKVGYPGPSGPLGARGIPGIKGTKGSPGNIKDQPRPAFSAIRRNPPMGGNVVIFDTVITNQEEPYQNHSGRFVCTVPGYYYFTFQVLSQWEICLSIVSSSRGQVRRSLGFCDTTNKGLFQVVSGGMVLQLQQGDQVWVEKDPKKGHIYQGSEADSVFSGFLIFPSA

SEQ ID NO: 2208 - protein, 207 aa, Homo sapiens
  SITE (75): Xaa equals any of the naturally occurring L-amino acids
  SITE (77): Xaa equals any of the naturally occurring L-amino acids
  SITE (112): Xaa equals any of the naturally occurring L-amino acids
MDVGPSSLPHLGLKLLLLLLLLPLRGQANTGCYGIPGMPGLPGAPGKDGYDGLPGPKGEPGIPAIPGIRGPKGQXGXAEIPVSVHGHSADPPAPCTQQPDQIQRGPHQPAEXYDTSTGKFTCKVPGLYYFVYHASHTANLCVLLYRSGVKVVTFCGHTSKTNQVNSGGVLLRLQVGEEVWLAVNDYYDMVGIQGSDSVFSGFLLFPD

SEQ ID NO: 2209 - protein, 235 aa, Homo sapiens
MDMRVPAQLLGLLLLWLRGARCDMQMTQSPSSLSASVGDRVTITCRTSQSIGKFLNWYQQKPGQAPKLLISGASILQTGVPSRFSGSGSATYFTLTINDLHPEDSATYYCQQDYTTPLFGQGTKVEIKRTVAAPSVFIFPPSDEQLKSGTASVVCLLNNFYPREAKVQWKVDNALQSGNSQESVTEQDSKDSTYSLSSTLTLSKADYEKHKVYACEVTHQGLSSPVTKSFNRGEC

SEQ ID NO: 2210 - protein, 234 aa, Homo sapiens
  SITE (120): Xaa equals any of the naturally occurring L-amino acids
MRVPAQLLGLLLLWLSGARCDIQLTQSPSSLSASLGDSVTITCQASQDIANYLNWYQQKPGKPPKLVIFDGSILHTGVPSRFSGGGSGTHFTFTINNLQPDDVATYSCQQYNTFPLTFGXGTKVEIKRTVAAPSVFIFPPSDEQLKSGTASVVCLLNNFYPREAKVQWKVDNALQSGNSQESVTEQDSKDSTYSLSSTLTLSKADYEKHKVYACEVTHQGLSSPVTKSFNRGEC

SEQ ID NO: 2211 - protein, 206 aa, Homo sapiens
MDVGPSSLPHLGLKLLLLLLLLPLRGQANTGCYGIPGMPGLPGAPGKDGYDGLPGPKGEPGIPAIPGIRGPKGRYKQKFQSVFTVTRQTHQPPAPNSLIRFNAVLTNPQGDYDTSTGKFTCKVPGLYYFVYHASHTANLCVLLYRSGVKVVTFCGHTSKTNQVNSGGVLLRLQVGEEVWLAVNDYYDMVGIQGSDSVFSGFLLFPD

SEQ ID NO: 2212 - protein, 208 aa, Homo sapiens
MDVGPSSLPHLGLKLLLLLLLLPLRGQANTGCYGIPGMPGLPGAPGKDGYDGLPGPKGEPGIPAIPGIRGPKGQKGEPGLPGHPGKNGPMGPPGMPGVPGPMGIPGEPGEEGRYKQKFQSVFTVTRQTHQPPAPNSLIRFNAVLTNPQEIMTRALASSPAKSPASTTLSTTRRIQPTCACCCTAAASKWSPSVATRPKPIRSTRAVCC

SEQ ID NO: 2213 - protein, 263 aa, Homo sapiens
  SITE (27): Xaa equals any of the naturally occurring L-amino acids
  SITE (112): Xaa equals any of the naturally occurring L-amino acids
MCLLGGLSAPPLLLLPLLPLLLCPPTXQGDCSFPPELPNAIQSVGDQQSFPEKFTVTYKCKEGFVKVPGKADSVVCLNNKWSEVAEFCNRSCDVPTRLQFASLKKSFTKQNXFPVGSVVEYECRPGYQRDHLLSGKLTCLLNFTWSKPDEFCKRKSCPNPGDLRHGHVNIPTDILYAAVIHFSCNKGYRLVGAASSYCSIVNDDVGWSDPLPECQEIFCPEPPKISNGVILDQQNTYVYQQAVKYECIKGFTLIGENSDLLYC

SEQ ID NO: 2214 - protein, 55 aa, Homo sapiens
MCLLGGLSAPPLLLLPLLPLLLCPPTGRVTAAFPQSYLMPYKVWVTNRVFLKNSQ

SEQ ID NO: 2215 - protein, 350 aa, Homo sapiens
  SITE (3): Xaa equals any of the naturally occurring L-amino acids
  SITE (4): Xaa equals any of the naturally occurring L-amino acids
MAXXVVLLALVAGVLGNEFSILKSPGSVVFRNGNWPIPGERIPDVAALSMGFSVKEDLSWPGLAVGNLFHRPRATVMVMVKGVNKLALPPGSVISYPLENAVPFSLDSVANSIHSLFSEETPVVLQLAPSEERVYMVGKANSVFEDLSVTLRQLRNRLFQENSVLSSLPLNSLSRNNEVDLLFLSELQVLHDISSLLSRHKHLAKDHSPDLYSLELAGLDEIGKRYGEDSEQFRDASKILVDALQKFADDMYSLYGGNAVVELVTVKSFDTSLIRKTRTILEAKQAKNPASPYNLAYKYNFEYSVVFNMVLWIMIALALAVIITSYNIWNMDPGYDSIIYRMTNQKIRMD

SEQ ID NO: 2216 - protein, 350 aa, Homo sapiens
MAVFVVLLALVAGVLGNEFSILKSPGSVVFRNGNWPIPGERIPDVAALSMGFSVKEDLSWPGLAVGNLFHRPRATVMVMVKGVNKLALPPGSVISYPLENAVPFSLDSVANSIHSLFSEETPVVLQLAPSEERVYMVGKANSVFEDLSVTLRQLRNRLFQENSVLSSLPLNSLSRNNEVDLLFLSELQVLHDISSLLSRHKHLAKDHSPDLYSLELAGLDEIGKRYGEDSEQFRDASKILVDALQKFADDMYSLYGGNAVVELVTVKSFDTSLIRKTRTILEAKQAKNPASPYNLAYKYNFEYSVVFNMVLWIMIALALAVIITSYNIWNMDPGYDSIIYRMTNQKIRMD

SEQ ID NO: 2217 - protein, 167 aa, Homo sapiens
  SITE (61): Xaa equals any of the naturally occurring L-amino acids
  SITE (79): Xaa equals any of the naturally occurring L-amino acids
MCSLFHAFIFAQLWTVYCEQSAVATNLQNQNEFSFTAILTALEFWSRVTPSILQLMAHNKXMVEMVCLHVISLMEALQXCNSTIFVKLIPMWLPMIQSNIKHLSAGLQLRLQAIQNHVNHHSLRTLPGSGQSSAGLAALRKWLQCTQFKMAQVEIQSSEAASQFYPL

SEQ ID NO: 2218 - protein, 110 aa, Homo sapiens
MEFPGADGCNQVDAEYLKVGSEGHFRVPALGYLDVRIVDTDYSSFAVLYIYKELEGALSTMVQLYSRTQDVSPQALKAFQDFYPTLGLPEDMMVMLPQSDACNPESKEAP

SEQ ID NO: 2219 - protein, 115 aa, Homo sapiens
  SITE (101): Xaa equals any of the naturally occurring L-amino acids
  SITE (106): Xaa equals any of the naturally occurring L-amino acids
ISLLWNLWQSVKIGCGEKLYPGHTKDSRNHLGQNLSFLHFIYLFPPPHSTHTLPTSSTSTFKHKDVRVFSLSVSWRTGCWERKGQMSKGGCRAGQADSGGXLEELXPSQTWVSKT

SEQ ID NO: 2220 - protein, 262 aa, Homo sapiens
  SITE (254): Xaa equals any of the naturally occurring L-amino acids
MECCRRATPGTLLLFLAFLLLSSRTARSEEDRDGLWDAWGPWSECSRTCGGGASYSLRRCLSSKSCEGRNIRYRTCSNVDCPPEAGDFRAQQCSAHNDVKHHGQFYEWLPVSNDPDNPCSLKCQAKGTTLVVELAPKVLDGTRCYTESLDMCISGLCQIVGCDHQLGSTVKEDNCGVCNGDGSTCRLVRGQYKSQLSATKSDDTVVAIPYGSRHIRLVLKGPDHLYLETKTLQGTKGENSLSSTGTFLVDNSSXTSRNFQTK

SEQ ID NO: 2221 - protein, 514 aa, Homo sapiens
ELCRQPKPSTVQACNRFNCPPAWYPAQWQPCSRTCGGGVQKREVLCKQRMADGSFLELPETFCSASKPACQQACKKDDCPSEWLLSDWTECSTSCGEGTQTRSAICRKMLKTGLSTVVNSTLCPPLPFSSSIRPCMLATCARPGRPSTKHSPHIAAARKVYIQTRRQRKLHFVVGGFAYLLPKTAVVLRCPARRVRKPLITWEKDGQHLISSTHVTVAPFGYLKIHRLKPSDAGVYTCSAGPAREHFVIKLIGGNRKLVARPLSPRSEEEVLAGRKGGPKEALQTHKHQNGIFSNGSKAEKRGLAANPGSRYDDLVSRLLEQGGWPGELLASWEAQDSAERNTTSEEDPGAEQVLLHLPFTMVTEQRRLDDILGNLSQQPEELRDLYSKHLVAQLAQEIFRSHLEHQDTLLKPSERRTSPVTLSPHKHVSGFSSSLRTSSTGDAGGGSRRPHRKPTILRKISAAQQLSASEVVTHLGQTVALASGTLSVFCTVRPSATQGLPSAGPGMEKKSVQ

SEQ ID NO: 2222 - protein, 1745 aa, Homo sapiens
MECCRRATPGTLLLFLAFLLLSSRTARSEEDRDGLWDAWGPWSECSRTCGGGASYSLRRCLSSKSCEGRNIRYRTCSNVDCPPEAGDFRAQQCSAHNDVKHHGQFYEWLPVSNDPDNPCSLKCQAKGTTLVVELAPKVLDGTRCYTESLDMCISGLCQIVGCDHQLGSTVKEDNCGVCNGDGSTCRLVRGQYKSQLSATKSDDTVVAIPYGSRHIRLVLKGPDHLYLETKTLQGTKGENSLSSTGTFLVDNSSVDFQKFPDKEILRMAGPLTADFIVKIRNSGSADSTVQFIFYQPIIHRWRETDFFPCSATCGGGYQLTSAECYDLRSNRVVADQYCHYYPENIKPKPKLQECNLDPCPARWEATPWTACSSSCGGGIQSRAVSCVEEDIQGHVTSVEEWKCMYTPKMPIAQPCNIFDCPKWLAQEWSPCTVTCGQGLRYRVVLCIDHRGMHTGGCSPKTKPHIKEECIVPTPCYKPKEKLPVEAKLPWFKQAQELEEGAAVSEEPSFIPKAWSACTVTCGVGTQVRIVRCQVLLSFSQSVADLPIDECEGPKPASQRACYAGPCSGEIPEFNPDETDGLFGGLQDFDELYDWEYEGFTKCSESCGGGVQEAVVSCLNKQTREPAEENLCVTSRRPPQLLKSCNLDPCPARWEIGKWSPCSLTCGVGLQTRDVFCSHLLSREMNETVILADELCRQPKPSTVQACNRFNCPPAWYPAQWQPCSRTCGGGVQKREVLCKQRMADGSFLELPETFCSASKPACQQACKKDDCPSEWLLSDWTECSTSCGEGTQTRSAICRKMLKTGLSTVVNSTLCPPLPFSSSIRPCMLATCARPGRPSTKHSPHIAAARKVYIQTRRQRKLHFVVGGFAYLLPKTAVVLRCPARRVRKPLITWEKDGQHLISSTHVTVAPFGYLKIHRLKPSDAGVYTCSAGPAREHFVIKLIGGNRKLVARPLSPRSEEEVLAGRKGGPKEALQTHKHQNGIFSNGSKAEKRGLAANPGSRYDDLVSRLLEQGGWPGELLASWEAQDSAERNTTSEEDPGAEQVLLHLPFTMVTEQRRLDDILGNLSQQPEELRDLYSKHLVAQLAQEIFRSHLEHQDTLLKPSERRTSPVTLSPHKHVSGFSSSLRTSSTGDAGGGSRRPHRKPTILRKISAAQQLSASEVVTHLGQTVALASGTLSVLLHCEAIGHPRPTISWARNGEEVQFSDRILLQPDDSLQILAPVEADVGFYTCNATNALGYDSVSIAVTLAGKPLVKTSRMTVINTEKPAVTVDIGSTIKTVQGVNVTINCQVAGVPEAEVTWFRNKSKLGSPHHLHEGSLLLTNVSSSDQGLYSCRAANLHGELTESTQLLILDPPQVPTQLEDIRALLAATGPNLPSVLTSPLGTQLVLDPGNSALLGCPIKGHPVPNITWFHGGQPIVTATGLTHHILAAGQILQVANLSGGSQGEFSCLAQNEAGVLMQKASLVIQDYWWSVDRLATCSASCGNRGVQQPRLRCLLNSTEVNPAHCAGKVRPAVQPIACNRRDCPSRWMVTSWSACTRSCGGGVQTRRVTCQKLKASGISTPVSNDMCTQVAKRPVDTQACNQQLCVEWAFSSWGQCNGPCIGPHLAVQHRQVFCQTRDGITLPSEQCSALPRPVSTQNCWSEACSVHWRVSLWTLCTATCGNYGFQSRRVECVHARTNKAVPEHLCSWGPRPANWQRCNITPCENMECRDTTRYCEKVKQLKLCQLSQFKSRCCGTCGKA

SEQ ID NO: 2223 - protein, 19 aa, Homo sapiens
ECCETAAPPGPHRRPESGQ

SEQ ID NO: 2224 - protein, 363 aa, Homo sapiens
MAAVLTWALALLSAFSATQARKGFWDYFSQTSGDKGRVEQIHQQKMAREPATLKDSLEQDLNNMNKFLEKLRPLSGSEAPRLPQDPVGMRRQLQEELEEVKARLQPYMAEAHELVGWNLEGLRQQLKPYTMDLMEQVALRVQELQEQLRVVGEDTKAQLLGGVDEAWALLQGLQSRVVHHTGRFKELFHPYAESLVSGIGRHVQELHRSVAPHAPASPARLSRCVQVLSRKLTLKAKALHARIQQNLDQLREELIRAFAGTGTEEGAGPDPQMLSEEVRQRLQAFRQDTYLQIAAFTRAIDQETEEVQQQLAPPPPGHSAFAPEFQQTDSGKVLSKLQARLDDLWEDITHSLHDQGHSHLGDP

SEQ ID NO: 2225 - protein, 183 aa, Homo sapiens
  SITE (86): Xaa equals any of the naturally occurring L-amino acids
  SITE (146): Xaa equals any of the naturally occurring L-amino acids
MAVGKFLLGSLLLLSLQLGQGWGPDARGVPVADGEFSSEQVAKAGGTWLGKDFQGPSVTSQLSPALTLLTVSALPSHRHPPPPCPXAPSPVWSMPAVEPDPVRGRARPGLRLIGEVIFRYCAGSCPRGARTQHGLALARLQGQGRXHGGPCCRPTRYTDVAFLDDRHAGSGCPSSRRLCGCGG

SEQ ID NO: 2226 - protein, 252 aa, Homo sapiens
  SITE (86): Xaa equals any of the naturally occurring L-amino acids
  SITE (116): Xaa equals any of the naturally occurring L-amino acids
  SITE (135): Xaa equals any of the naturally occurring L-amino acids
  SITE (146): Xaa equals any of the naturally occurring L-amino acids
MAVGKFLLGSLLLLSLQLGQGWGPDARGVPVADGEFSSEQVAKAGGTWLGKDFQGPSVTSQLSPALTLLTVSALPSHRHPPPPCPXAPSPVWSMPAVEPDPVRGRARPGLRLIGEXHLPLLRRQLPPWCPHPAWXGAGPAAGPGPXPRRALLPAHSLHRRGLPRRPPRWQRLPQLSAALRLWWLRVPGLAPRSCSAGGARLTYLLETWMQRQRGGEWAGATSSECNKGHHSPGKKKKKKKKKKKKLEGGSRY

SEQ ID NO: 2227 - protein, 150 aa, Homo sapiens [sequence omitted]

SEQ ID NO: 2228 - protein, 125 aa, Homo sapiens
MIPFPACLLLALFPKVQVGRTTSAYFSTIPSMPARSQINLPVESGSALLEPRGKGRVERVCPVAWSSMVASCLPSPSSGGPEGSLGTVPQILTQGPAWGRDGCRQNALYRDFLLLGRCVSPTICL

SEQ ID NO: 2229 - protein, 766 aa, Homo sapiens
MIWRSRAGAELFSLMALWEWIALSLHCWVLAVAAVSDQHATSPFDWLLSDKGPFHRSQEYTDFVDRSRQGFSTRYKIYREFGRWKVNNLAVERRNFLGSPLPLAPEFFRNIRLLGRRPTLQQITENLIKKYGTHFLLSATLGGEESLTIFVDKRKLSKRAEGSDSTTNSSSVTLETLHQLAASYFIDRDSTLRRLHHIQIASTAIKVTETRTGPLGCSNYDNLDSVSSVLVQSPENKIQLQGLQVLLPDYLQERFVQAALSYIACNSEGEFICKENDCWCHCGPKFPECNCPSMDIQAMEENLLRITETWKAYNSDFEESDEFKLFMKRLPMNYFLNTSTIMHLWTMDSNFQRRYEQLENSMKQLFLKAQKIVHKLFSLSKRCHKQPLISLPRQRTSTYWLTRIQSFLYCNENGLLGSFSEETHSCTCPNDQVVCTAFLPCTVGDASACLTCAPDNRTRCGTCNTGYMLSQGLCKPEVAESTDHYIGFETDLQDLEMKYLLQKTDRRIEVHAIFISNDMRLNSWFDPSWRKRMLLTLKSNKYKSSLVHMILGLSLQICLTKNSTLEPVLAVYVNPFGGSHSESWFMPVNENSFPDWERTKLDLPLQCYNWTLTLGNKWKTFFETVHIYLRSRIKSNGPNGNESIYYEPLEFIDPSRNLGYMKINNIQVFGYSMHFDPEAIRDLILQLDYPYTQGSQDSALLQLLEIRDRVNKLSPPGQRRLDLFSCLLRHRLKLSTSEVVRIQSALQAFNAKLPNTMDYDTTKLCS

SEQ ID NO: 2230 - protein, 61 aa, Homo sapiens; identical to SEQ ID NO: 580

SEQ ID NO: 2231 - protein, 133 aa, Homo sapiens
MRMSLAQRVLLTWLFTLLFLIMLVLKLDEKAPWNWFLIFIPVWIFDTILLVLLIVKMAGRCKSGFDPRHGSHNIKKKAWYLIAMLLKLAFCLALCAKLEQFTTMNLSYVFIPLWALLAGALTELGYNVFFVRD

SEQ ID NO: 2232 - protein, 131 aa, Homo sapiens [sequence omitted]

SEQ ID NO: 2233 - protein, 298 aa, Homo sapiens; identical to SEQ ID NO: 2196

SEQ ID NO: 2234 - protein, 158 aa, Homo sapiens; identical to SEQ ID NO: 1633

SEQ ID NO: 2235 - protein, 58 aa, Homo sapiens
MTKALIPTPFFLAAMWPLWQHSWAQTLRSQRQEADAWAKAGAGNSRGSLAWRLLMSSG

SEQ ID NO: 2236 - protein, 71 aa, Homo sapiens
MLVAAIVFISFGVVAAFCCAIVDGVFAAQHIEPKAPHHGKMPVYSSGVGYLYDVYQTEVSRSTEIHVGLLN

SEQ ID NO: 2237 - protein, 605 aa, Homo sapiens
MGRLLRAARLPPLLSPLLLLLVGGAFLGACVAGSDEPGPEGLTSTSLLDLLLPTGLEPLDSEEPSETMGLGAGLGAPGSGFPSEENEESRILQPPQYFWEEEEELNDSSLDLGPTADYVFPDLTEKAGSIEDTSQAQELPNLPSPLPKMNLVEPPWHMPPREEEEEEEEEEEREKEEVEKQEEEEEEELLPVNGSQEEAKPQVRDFSLTSSSQTPGATKSRHEDSGDQASSGVEVESSMGPSLLLPSVTPTTVTPGDQDSTSQEAEATVLPAAGLGVEFEAPQEASEEATAGAAGLSGQHEEVPALPSFPQTTAPSGAEHPDEDPLGSRTSASSPLAPGDMELTPSSATLGQEDLNQQLLEGQAAEAQSRIPWDSTQVICKDWSNLAGKNYIILNMTENIDCEVFRQHRGPQLLALVEEVLPRHGSGHHGAWHISLSKPSEKEQHLLMTLVGEQGVVPTQDVLSMLGDIRRSLEEIGIQNYSTTSSCQARASQVRSDYGTLFVVLVVIGAICIIIIALGLLYNCWQRRLPKLKHVSHGEELRFVENGCHDNPTLDVASDSQSEMQEKHPSLNGGGALNGPGSWGALMGGKRDPEDSDVFEEDTHL

SEQ ID NO: 2238 - protein, 432 aa, Homo sapiens
MDARWWAVVVLAAFPSLGAGGETPEAPPESWTQLWFFRFVVNAAGYASFMVPGYLLVQYFRRKNYLETGRGLCFPLVKACVFGNEPKASDEVPLAPRTEAAETTPMWQALKLLFCATGLQVSYLTWGVLQERVMTRSYGATATSPGERFTDSQFLVLMNRVLALIVAGLSCVLCKQPRHGAPMYRYSFASLSNVLSSWCQYEALKFVSFPTQVLAKASKVIPVMLMGKLVSRRSYEHWEYLTATLISIGVSMFLLSSGPEPRSSPATTLSGLILLAGYIAFDSFTSNWQDALFAYKMSSVQMMFGVNFFSCLFTVGSLLEQGALLEGTRFMGRHSEFAAHALLLSICSACGQLFIFYTIGQFGAAVFTIIMTLRQAFAILLSCLLYGHTVTVVGGLGVAVVFAALLLRVYARGRLKQRGKKAVPVESPVQKV

SEQ ID NO: 2239 - protein, 432 aa, Homo sapiens; identical to SEQ ID NO: 2238

SEQ ID NO: 2240 - protein, 69 aa, Homo sapiens
MKAVVLLKAFSFSLCSAISPVTPGFRQTINVLDTVAFSAFFIYLFTVTASINFYAYFSSFLAGAPFIKI

SEQ ID NO: 2241 - protein, 57 aa, Homo sapiens [sequence omitted]

SEQ ID NO: 2242 - protein, 145 aa, Homo sapiens
MLRTLVLKQTLDLLLPLLEALLVLGVPQHLELQPLPVQVSLLLLQLLDLGSLKSHRLHHFHSKALQLPVLDHLDFQDFQLPWQQVLSELPVAPAFGGGSSVAGFGSPGLTFSHWLFLSHPVDTFGNSQAYPTSLSALQASINCNR

SEQ ID NO: 2243 - protein, 77 aa, Homo sapiens
MAICQFFLQGRCRFGDRCWNEHPGARGAGGGRQQPQQQPSGNNRRGWNTTSQRYSNVIQPSSFSKSTPWGGSRDQET

SEQ ID NO: 2244 - protein, 86 aa, Homo sapiens [sequence omitted]

SEQ ID NO: 2245 - protein, 208 aa, Homo sapiens; identical to SEQ ID NO: 732

SEQ ID NO: 2246 - protein, 215 aa, Homo sapiens
MRLPAWCRHTTLAISCWHCLVLARASADSASLPTISHLGVKPLSVGWGAPSTLPVSPCGGKPAAPTSASPAAAPLRFWRPGASGGGAGGTRRLALCRLVTARTTLATGTPGLSARPRQRPCLLPVLPRRPAELSVSLEPSPGSSGRGFLCLPFCKRDADTSLGQTLTSSCSLSSILVGGTLRPRCSCPPFTQRSAFHLRTPHNQYHHGSTSLASH

SEQ ID NO: 2247 - protein, 139 aa, Homo sapiens; identical to SEQ ID NO: 726

SEQ ID NO: 2248 - protein, 363 aa, Homo sapiens
MKTLLLLVGLLLTWENGRVLGDQMVSDTELQEMSTEGSKYINREIKNALKGVKQIKTLIEQTNEERKSLLTNLEEAKKKKEDALNDTKDSEMKLKASQGVCNDTMMALWEECKPCLKQTCMKFYARVCRSSTGLVGHQVEEFLNQSSPFYFWINGDRIDSLLENDRQQTHALDVMQDSFDRASSIMDELFQDRFFTREAQDPFHFSPFSSFQRRPFFFNIKHRFARNIMPFPGYQPLNFHDMFQPFFDMIHQAQQAMDVNLHRLPHFPMEFTEEDNQDGAVCKEIRHNSTGCLKMKDQCEKCREILSVDCSSNNPAQVQLRQELNNSLQIAEKFTKLVRRAAAVLPGEDVQHVLPAEAAGRAV

SEQ ID NO: 2249 - protein, 85 aa, Homo sapiens [sequence omitted]

SEQ ID NO: 2250 - protein, 184 aa, Homo sapiens; identical to SEQ ID NO: 347

SEQ ID NO: 2251 - protein, 352 aa, Homo sapiens [sequence omitted]

SEQ ID NO: 2252 - protein, 448 aa, Homo sapiens
MAWASRLGLLLALLLPVVGASTPGTVVRLNKAALSYVSEIGKAPLQRALQVTVPHFLDWSGEALQPTRIRILNVHVPRLHLKFIAGFGVRLLAAANFTFKVFRAPEPLELTLPVELLADTRVTQSSIRTPVVSISACSLFSGHANEFDGSNSTSHALLVLVQKHIKAVLSNKLCLSISNLVQGVNVHLGTLIGLNPVGPESQIRYSMVSVPTVTSDYISLEVNAVLFLLGKPIILPTDATPFVLPRHVGTEGSMATVGLSQQLFDSALLLLQKAGALNLDITGQLRSDDNLLNTSALGRLIPEVARQFPEPMPVVLKVRLGATPVAMLHTNNATLRLQPFVEVLATASNSAFQSLFSLDVVVNLRLQLSVSKVKLQGTTSVLGDVQLTVASSNVGFIDTDQVRTLMGTVFEKPLLDHLNALLAMGIALPGVVNLHYVPLRSLSMRATW

SEQ ID NO: 2253 - protein, 183 aa, Homo sapiens
MEPEEGTPLWRLQKLPAELGPQLLHKIIDGICGRAYPVYQDYHTVWESEEWMHVLEDIAKFFKAIVGKNLPDEEIFQQLNQLNSLHQETIMKCVKSRKDEIKQALSREIVAISSAQLQDFDWQVKLALSSDKIAALRMPLLSLHLDVKENGEVKPYSIEMSREELQNLIQSLEAANKVVLQLK

SEQ ID NO: 2254 - protein, 121 aa, Homo sapiens
MPCGRQHLQNLDDAVNGSAWTILLLTENFLRDTWCNFQFYTSLMNSVNRQHKYNSVIPMRPLNNPLPRERTPFALQTINALEEESRGFPTQVERIFQESVYKTQQTIWKETRNMVQRQFIA

SEQ ID NO: 2255 - protein, 251 aa, Homo sapiens
MLFHYDWISIPLVYTQVVTIAVYSFFALSLVGRQFVEPEAGAAKPQKLLKPGQEPAPALGDPDMYVPLTTLLQFFFYAGWLKVAEQIINPFGEDDDDFETNQLIDRNLQVSLLSVDEMYQNLPPAEKDQYWDEDQPQPPYTVATAAESLRPSFLGSTFNLRMSDDPEQSLQVEASPGSGRPAPAAQTPLLGRFLGVGAPSPAISLRNFGRVRGTPRPPHLLRFRAEEGGDPEAAARIEEESAESGDEALEP

SEQ ID NO: 2256 - protein, 125 aa, Homo sapiens
MRPGKKVLVMGIVDLNPESFAISLTCGDSEDPPADVAIELKAVFTDRQLLRNSCISGERGEEQSAIPYFPFIPDQPFRVEILCEHPRFRVFVDGHQLFDFYHRIQTLSAIDTIKINGDLQITKLG

SEQ ID NO: 2257 - protein, 170 aa, Homo sapiens
MISIHNEEENAFILDTLKKQWKGPDDILLGMFYDTDDASFKWFDNSNMTFDKWTDQDDDEDLVDTCAFLHIKTGEWKKGNCEVSSVEGTLCKTAIPYKRKYLSDNHILISALVIASTVILTVLGAIIWFLYKKHSDSRFTTVFSTAPQSPYNEDCVLVVGEENEYPVQFD

SEQ ID NO: 2258 - protein, 595 aa, Homo sapiens
MLLLLLLLPPLLCGRVGAKEQKDYLLTMQKSVTVQEGLCVSVLCSFSYPQNGWTASDPVHGYWFRAGDHVSRNIPVATNNPARAVQEETRDRFHLLGDPQNKDCTLSIRDTRESDAGTYVFCVERGNMKWNYKYDQLSVNVTASQDLLSRYRLEVPESVTVQEGLCVSVPCSVLYPHYNWTASSPVYGSWFKEGADIPWDIPVATNTPSGKVQEDTHGRFLLLGDPQTNNCSLSIRDARKGDSGKYYFQVERGSRKWNYIYDKLSVHVTALTHMPTFSIPGTLESGHPRNLTCSVPWACEQGTPPTITWMGASVSSLDPTITRSSMLSLIPQPQDHGTSLTCQVTLPGAGVTMTRAVRLNISYPPQNLTMTVFQGDGTASTTLRNGSALSVLEGQSLHLVCAVDSNPPARLSWTWGSLTLSPSQSSNLGVLELPRVHVKDEGEFTCRAQNPLGSQHISLSLSLQNEYTGKMRPISGVTLGAFGGAGATALVFLYFCIIFVVVRSCRKKSARPAVGVGDTGMEDANAVRGSASQGPLIESPADDSPPHHAPPALATPSPEEGEIQYASLSFHKARPQYPQEQEAIGYEYSEINIPK

SEQ ID NO: 2259 - protein, 274 aa, Homo sapiens
MSSNGIPECYAEEDEFSGLETDTAVPTEEAYVIYDEDYEFETSRPPTTTEPSTTATTPRVIPEEGAISSFPEEEFDLAGRKRFVAPYVTYLNKDPSAPCSLTDALDHFQVDSLDEIIPNDLKKSDLPPQHAPRNITVVAVEGCHSFVIVDWDKATPGDVVTGYLVYSASYEDFIRNKWSTQASSVTHLPIENLKPNTRYYFKVQAQNPHGYGPISPSVSFVTESDNPLLVVRPPGGEPIWIPFAFKHDPSYTDCHGRQYVKRTLVSKVRGSWSL

SEQ ID NO: 2260 - protein, 468 aa, Homo sapiens
MPALHTLNLDHNLIDALPPGAFAQLGQLSRLDLTSNRLATLAPDPLFSRGRDAEASPAPLVLSFSGNPLHCNCELLWLRRLARPDDLETCASPPGLAGRYFWAVPEGEFSCEPPLIARHTQRLWVLEGQRATLRCRALGDPAPTMHWVGPDDRLVGNSSRARAFPNGTLEIGATGAGDAGGYTCIATNPAGEATARVELRVLALPHGGNSSAEGGRPGPSDIAASARTAAEGEGTLESEPAVQVTEVTATSGLVSWGPGRPADPVWMFQIQYNSSEDETLIYRIVPASSHHFLLKHLVPGADYDLCLLALSPAAGPSDLTATRLLGCAHFSTLPASPLCHALQAHVLGGTLTVAVGGVLVAALLVFTVALLVRGRGAGNGRLPLKLSHVQSQTNGGPSPTPKAHPPRSPPPRPQRSCSLDLGDAGCYGYARRLGGAWARRSHSVHGGLLGAGCRGVGGSAERLEESVV

SEQ ID NO: 2261 - protein, 86 aa, Homo sapiens [sequence omitted]

SEQ ID NO: 2262 - protein, 105 aa, Homo sapiens
MKGSRALLLVALTLFCICRMATGEDNDEFFMDFLQTLLVGTPEELYEGTLGKYNVNEDAKAAMTELKSCIDGLQPMHKAELVKLLVQVLGSQDGAGTDYKDDDDK

SEQ ID NO: 2263 - protein, 167 aa, Homo sapiens
MAASVCSGLLGPRVLSWSRELPCAWRALHTSPVCAKNRAARVRVSKGDKPVTYEEAHAPHYIAHRKGWLSLHTGNLDGEDHAAERTVEDVFLRKFMWGTFPGCLADQLVLKRRGNQLEICAVVLRQLSPHKYYFLVGYSETLLSYFYKCPVRLHLQTVPSKVVYKYL

SEQ ID NO: 2264 - protein, 203 aa, Homo sapiens
MARPRPREYKAGDLVFAKMKGYPHWPARIDELPEGAVKPPANKYPIFFFGTHETAFLGPKDLFPYKEYKDKFGKSNKRKGFNEGLWEIENNPGVKFTGYQAIQQQSSSETEGEGGNTADASSEEEGDRVEEDGKGKRKNEKAGSKRKKSYTSKKSSKQSRKSPGDEDDKDCKEEENKSSSEGGDAGNDTRNTTSDLQKTSEGT

SEQ ID NO: 2265 - protein, 253 aa, Homo sapiens
MRSGKMAPKPQSRCTSTRSAGEAPSENQSPSKGPEEASSEVQDTNEVHVPGDQDEPQTLGKKGSKNNISVYMTLNQKKSDSSSASVCSIDSTDDLKSSNSECSSSESFDFPPGSMHAPSTSSTSSSSKEEKKLSNSLKMKVFSKNVSKCVTPDGRTICVGDIVWAKIYGFPWWPARILTITVSRKDNGLLVRQEARISWFGSPTTSFLALSQLSPFLENFQSRFNKKRKGLYRKAITEAAKAAKQLTPEVRAC

SEQ ID NO: 2266 - protein, 314 aa, Homo sapiens
MPHAFKPGDLVFAKMKGYPHWPARIDDIADGAVKPPPNKYPIFFFGTHETAFLGPKDLFPYDKCKDKYGKPNKRKGFNEGLWEIQNNPHASYSAPPPVSSSDSEAPEANPADGSDADEDDEDRGVMAVTAVTATAASDRMESDSDSDKSSDNSGLKRKTPALKMSVSKRARKASSDLDQASVSPSEEENSESSSESEKTSDQDFTPEKKAAVRAPRRGPLGGRKKKKAPSASDSDSKADSDGAKPEPVAMARSASSSSSSSSSSDSDVSVKKPPRGRKPTEKPLPKPRGRKPKPERPPSSSSSDSDSDEVDRIT

SEQ ID NO: 2267 - protein, 281 aa, Homo sapiens
MGSRGQGLLLAYCLLLAFASGLVLSRVPHVQGEQQEWEGTEELPSPPDHAERAEEQHEKYRPSQDQGLPASRCLRCCDPGTSMYPATAVPQINITILKGEKGDRGDRGLQGKYGKTGSAGARGHTGPKGQKGSMGAPGERCKSHYAAFSVGRKKPMHSNHYYQTVIFDTEFVNLYDHFNMFTGKFYCYVPGLYFFSLNVHTWNQKETYLHIMKNEEEVAILFAQVGDRSIMQSQSLMLELREQDQVWVRLYKGERENAIFSEELDTYITFSGYLVKHATEP

SEQ ID NO: 2268 - DNA, 733 bp, Homo sapiens
gggatccggagcccaaatcttctgacaaaactcacacatgcccaccgtgcccagcacctgaattcgagggtgcaccgtcagtcttcctcttccccccaaaacccaaggacaccctcatgatctcccggactcctgaggtcacatgcgtggtggtggacgtaagccacgaagaccctgaggtcaagttcaactggtacgtggacggcgtggaggtgcataatgccaagacaaagccgcgggaggagcagtacaacagcacgtaccgtgtggtcagcgtcctcaccgtcctgcaccaggactggctgaatggcaaggagtacaagtgcaaggtctccaacaaagccctcccaacccccatcgagaaaaccatctccaaagccaaagggcagccccgagaaccacaggtgtacaccctgcccccatcccgggatgagctgaccaagaaccaggtcagcctgacctgcctggtcaaaggcttctatccaagcgacatcgccgtggagtgggagagcaatgggcagccggagaacaactacaagaccacgcctcccgtgctggactccgacggctccttcttcctctacagcaagctcaccgtggacaagagcaggtggcagcaggggaacgtcttctcatgctccgtgatgcatgaggctctgcacaaccactacacgcagaagagcctctccctgtctccgggtaaatgagtgcgacggccgcgactctagaggat

SEQ ID NO: 2269 - protein, 5 aa, Artificial sequence
  misc_structure: membrane proximal motif of class 1 cytokine receptors
  misc_feature (3): Xaa equals any
WSXWS

SEQ ID NO: 2270 - DNA, 86 bp, Artificial Sequence
  primer_bind: forward primer useful for generation of a synthetic gamma activation site (GAS) containing promoter e lement
gcgcctcgagatttccccgaaatctagatttccccgaaatgatttccccgaaatgatttccccgaaatatctgccatctcaattag

SEQ ID NO: 2271 - DNA, 27 bp, Artificial Sequence
  primer_bind: reverse primer useful for generation of a synthetic gamma activation site (GAS) containing promoter e lement
gcggcaagctttttgcaaagcctaggc

SEQ ID NO: 2272 - DNA, 271 bp, Artificial Sequence
  misc_feature: Synthetic GAS-SV40 promoter sequence
ctcgagatttccccgaaatctagatttccccgaaatgatttccccgaaatgatttccccgaaatatctgccatctcaattagtcagcaaccatagtcccgcccctaactccgcccatcccgcccctaactccgcccagttccgcccattctccgccccatggctgactaattttttttatttatgcagaggccgaggccgcctcggcctctgagctattccagaagtagtgaggaggcttttttggaggcctaggcttttgcaaaaagctt

SEQ ID NO: 2273 - DNA, 32 bp, Artificial sequence
  primer_bind: primer useful for generation of a EGR/SEAP reporter construct
gcgctcgagggatgacagcgatagaaccccgg

SEQ ID NO: 2274 - DNA, 31 bp, Artificial Sequence
  primer_bind: primer useful for generation of a EGR/SEAP reporter construct
gcgaagcttcgcgactccccggatccgcctc

SEQ ID NO: 2275 - DNA, 12 bp, Artificial Sequence
  misc_binding: NF-KB binding site
ggggactttccc

SEQ ID NO: 2276 - DNA, 73 bp, Artificial Sequence
  primer_bind: forward primer useful for generation of a vector containing the NF-KB promoter element
gcggcctcgaggggactttcccggggactttccggggactttccgggactttccatcctgccatctcaattag

SEQ ID NO: 2277 - DNA, 256 bp, Artificial Sequence
  misc_feature: Synthetic NF-KB/SV40 promoter
ctcgaggggactttcccggggactttccggggactttccgggactttccatctgccatctcaattagtcagcaaccatagtcccgcccctaactccgcccatcccgcccctaactccgcccagttccgcccattctccgccccatggctgactaattttttttatttatgcagaggccgaggccgcctcggcctctgagctattccagaagtagtgaggaggcttttttggaggcctaggcttttgcaaaaagctt

SEQ ID NO: 2278 - DNA, 1041 bp, Homo sapiens
tcgacccacgcgtccgcccacgcgtccgcccacgcgtccgggcgcaggacgtgcactatggctcggggctcgctgcgccggttgctgcggctcctcgtgctggggctctggctggcgttgctgcgctccgtggccggggagcaagcgccaggcaccgccccctgctcccgcggcagctcctggagcgcggacctggacaagtgcatggactgcgcgtcttgcagggcgcgaccgcacagcgacttctgcctgggctgcgctgcagcacctcctgcccccttccggctgctttggcccatccttgggggcgctctgagcctgaccttcgtgctggggctgctttctggctttttggtctggagacgatgccgcagagagagaagttcaccacccccatagaggagaccggcggagagggctgcccagctgtggcgctgatccagtgacaatgtgccccctgccagccggggctcgcccactcatcattcattcatccattctagagccagtctctgcctcccagacgcggcgggagcaagctcctccaaccacaaggggggtggggggcggtgaatcacctcygaggcctgggcccagggttcaggggaacttccaaggtgtctggttgccctgcctctggctccagaacagaaagggagcctcacgctggctcacacaaaacagctgacactgactaaggaactgcagcatttgcacaggggaggggggtgccctccttcgtagaggccctgggggccaggctgacttggggggcagacttgacactaggccccactcactcagatgtcctgaaattccaccacgggggtcaccctggggggttagggacctatttttaacactagggggctggcccactaggagggctggccctaagatacagacccccccaactccccaaagcggggaggagatatttattttggggagagtttggaggggagggagaatttattaataaaagaatctttaactttaaaaaaaaaaaaaaaaaagggcggccgctctagaggatccctc

SEQ ID NO: 2279 - protein, 114 aa, Homo sapiens
  SITE (114): Xaa equals any of the naturally occurring L-amino acids
MARGSLRRLLRLLVLGLWLALLRSVAGEQAPGTAPCSRGSSWSADLDKCMDCASCRARPHSDFCLGCAAAPPAPFRLLWPILGGALSLTFVLGLLSGFLVWRRCRRERSSPPPX

What is claimed:

1. An albumin fusion protein comprising a member selected from the group consisting of:
(a) a Therapeutic protein X or a fragment or variant of a Therapeutic X and albumin or an albumin fragment or variant thereof;
(b) a Therapeutic protein X or a fragment or variant of a Therapeutic X and albumin or an albumin fragment or variant thereof, wherein said albumin or albumin fragment or variant thereof comprises the amino acid sequence of SEQ ID NO:18;
(c) a Therapeutic protein X or a fragment or variant of a Therapeutic X and albumin or an albumin fragment or variant thereof, of (a) or (b), wherein said fragment or variant of a Therapeutic X has a biological activity of the Therapeutic protein X, and wherein said albumin fragment or variant thereof has albumin activity;
(d) a Therapeutic protein X or a fragment of variant of a Therapeutic X and albumin or an albumin fragment or variant thereof, of (c), wherein said albumin activity is the ability to prolong the shelf life of the Therapeutic protein X compared to the shelf-life of the Therapeutic protein X in an unfused state;
(e) a Therapeutic protein X or a fragment of variant of a Therapeutic X and albumin or a fragment or variant thereof, of (c), wherein said albumin activity is the ability to prolong the serum half-life of the Therapeutic protein X compared to the serum half-life of the Therapeutic protein X in an unfused state;
(f) a Therapeutic protein X or a fragment of variant of a Therapeutic X and albumin or an albumin fragment or variant thereof, of (a)-(e), wherein the albumin fragment or variant comprises the amino acid sequence of amino acids 1-387 of SEQ ID NO:18.
(g) a Therapeutic protein X or a fragment of variant of a Therapeutic X and albumin or an albumin fragment or variant thereof, of (a) to (f), wherein the Therapeutic protein X or a fragment of variant of a Therapeutic X, is fused to the N-terminus of albumin, or the N-terminus of the albumin fragment or variant thereof;
(h) a Therapeutic protein X or a fragment of variant of a Therapeutic X and albumin or an albumin fragment or variant thereof, of (a) to (f), wherein the Therapeutic protein X or a fragment of variant of a Therapeutic X, is fused to the C-terminus of albumin, or the C-terminus of the albumin fragment or variant thereof;
(i) a Therapeutic protein X or a fragment of variant of a Therapeutic X and albumin or an albumin fragment or variant thereof, of (a) to (f), wherein the Therapeutic protein X or a fragment of variant of a Therapeutic X, is fused to the N-terminus and the C-terminus of albumin, or the N-terminus and the C-terminus of the albumin fragment or variant thereof;
a Therapeutic protein X or a fragment of variant of a Therapeutic X and albumin or an albumin fragment or variant thereof, of (a) to (f), which comprises a first Therapeutic protein X, or fragment or variant thereof, and a second Therapeutic protein X, or fragment or variant thereof, wherein said first Therapeutic protein X, or fragment or variant thereof, is different from said second Therapeutic protein X, or fragment or variant thereof;
(k) a Therapeutic protein X or a fragment of variant of a Therapeutic X and albumin or an albumin fragment or variant thereof, of (a) to (j), wherein the Therapeutic protein X or a fragment of variant of a Therapeutic X, is separated from the albumin or the albumin fragment or variant thereof by a linker;
(l) a Therapeutic protein X or a fragment of variant of a Therapeutic X and albumin or an albumin fragment or variant thereof, of (a) to (k), wherein the albumin fusion protein has the following formula:
R1−L−R2; R2−L−R1; or R1−L−R2−L−R1,
and further wherein R1 is Therapeutic protein:X, or fragment or variant thereof, L is a peptide linker, and R2 is albumin comprising the amino acid sequence of SEQ ID NO:1 or a fragment or variant of albumin;
(m) a Therapeutic protein X or a fragment of variant of a Therapeutic X and albumin or an albumin fragment or variant thereof, of (a) to (l), wherein shelf-life of the albumin fusion protein is greater than the shelf-life of the Therapeutic protein X or a fragment of variant of a Therapeutic X, in an unfused state;
(n) a Therapeutic protein X or a fragment of variant of a Therapeutic X and albumin or an albumin fragment or variant thereof, of (a) to (l), wherein serum half-life of the albumin fusion protein is greater than the serum half-life of the Therapeutic protein X or a fragment of variant of a Therapeutic X, in an unfused state;
(o) a Therapeutic protein X or a fragment of variant of a Therapeutic X and albumin or an albumin fragment or variant thereof, of (a) to (l), wherein the in vitro biological activity of a Therapeutic protein X or a fragment of variant of a Therapeutic X of said albumin fusion protein is greater than the in vitro biological activity of the a Therapeutic protein X or a fragment of variant of a Therapeutic X, in an unfused state; and
(p) a Therapeutic protein X or a fragment of variant of a Therapeutic X and albumin or an albumin fragment or variant thereof, of (a) to (l), wherein the in vivo biological activity of a Therapeutic protein X or a fragment of variant of a Therapeutic X of said albumin fusion protein is greater than the in vivo biological activity of the a Therapeutic protein X or a fragment of variant of a Therapeutic X, in an unfused state;

2. The albumin fusion protein of claim 1, which is non-glycosylated.

3. The albumin fusion protein of claim 1, which is expressed in yeast.

4. The albumin fusion protein of claim 3, wherein the yeast is glycosylation deficient.

5. The albumin fusion protein of claim 3 wherein the yeast is glycosylation and protease deficient.

6. The albumin fusion protein of claim 1, which is expressed by a mammalian cell.

7. The albumin fusion protein of claim 1, wherein the albumin fusion protein is expressed by a mammalian cell in culture.

8. The albumin fusion protein of claim 1, wherein the albumin fusion protein further comprises a secretion leader sequence.

9. A composition comprising the albumin fusion protein of claim 1 and a pharmaceutically acceptable carrier.

10. A kit comprising the composition of claim 9.

11. A method of treating a disease or disorder in a patient, comprising the step of administering the albumin fusion protein of claim 1.

12. The method of claim 11, wherein the disease or disorder comprises indication Y.

13. A method of treating a patient with a disease or disorder that is modulated by Therapeutic protein X or a fragment of variant of a Therapeutic X, comprising the step of administering an effective amount of the albumin fusion protein of claim 1.

14. The method of claim 13, wherein the disease or disorder is indication Y.

15. A method of extending the shelf life of Therapeutic protein X or a fragment of variant of a Therapeutic X, comprising the step of fusing the Therapeutic protein X or a fragment of variant of a Therapeutic X, to albumin, or albumin fragment or variant thereof, sufficient to extend the shelf-life of the Therapeutic protein X or a fragment of variant of a Therapeutic X, compared to the shelf-life of the Therapeutic protein X or a fragment of variant of a Therapeutic X, in an unfused state.

16. A method of prolonging the serum half-life of Therapeutic protein X or a fragment of variant of a Therapeutic X, comprising the step of fusing the Therapeutic protein X or a fragment of variant of a Therapeutic X, to albumin, or albumin fragment or variant thereof, sufficient to prolong the serum half-life of the Therapeutic protein X or a fragment of variant of a Therapeutic X, compared to the serum half-life of the Therapeutic protein X or a fragment of variant of a Therapeutic X, in an unfused state.

17. A nucleic acid molecule comprising a polynucleotide sequence encoding the albumin fusion protein of claim 1.

18. A vector comprising the nucleic acid molecule of claim 17.

19. A host cell comprising the nucleic acid molecule of claim 17.
